(19) United States
(12) Patent Application Publication
(10) Pub. No.: US 2025/0066797 A1
(43) Pub. Date: Feb. 27, 2025

(54) PROGRAMMABLE NUCLEASES AND METHODS OF USE

(71) Applicant: Mammoth Biosciences, Inc., Brisbane, CA (US)

(72) Inventors: Lucas Benjamin HARRINGTON, San Francisco, CA (US); William Douglass WRIGHT, Fairfield, CA (US); Pei-Qi LIU, Oakland, CA (US); Benjamin Julius RAUCH, San Francisco, CA (US); Wiputra Jaya HARTONO, San Francisco, CA (US); Bridget Ann Paine MCKAY, Portola Valley, CA (US); Danuta Sastre PHIPPS, San Mateo, CA (US); Yuxuan ZHENG, San Jose, CA (US); Nerea SANVISENS, San Francisco, CA (US); Sean CHEN, Brisbane, CA (US); David PAEZ-ESPINO, Concord, CA (US)

(21) Appl. No.: 18/673,055

(22) Filed: May 23, 2024

Related U.S. Application Data
(63) Continuation of application No. 17/819,137, filed on Aug. 11, 2022, now abandoned.
Application No. 17/819,137 is a continuation of application No. PCT/US2021/035781, filed on Jun. 3, 2021.
(60) Provisional application No. 63/034,346, filed on Jun. 3, 2020.
(60) Provisional application No. 63/037,535, filed on Jun. 10, 2020.
(60) Provisional application No. 63/040,998, filed on Jun. 18, 2020.
(60) Provisional application No. 63/092,481, filed on Oct. 15, 2020.
(60) Provisional application No. 63/116,083, filed on Nov. 19, 2020.
(60) Provisional application No. 63/124,676, filed on Dec. 11, 2020.
(60) Provisional application No. 63/156,883, filed on Mar. 4, 2021.
(60) Provisional application No. 63/178,472, filed on Apr. 22, 2021.

(51) Int. Cl. C12N 15/52; C12N 9/22; C12N 15/11; C12N 15/86; C12N 15/90; C12Q 1/6897

(52) U.S. Cl. CPC C12N 15/52; C12N 9/22; C12N 15/11; C12N 15/86; C12N 15/907; C12Q 1/6897; C12N 2310/20; C12N 2310/30; C12N 2750/14143; C12N 2800/80

(57) ABSTRACT

Provided herein, in certain embodiments, are programmable nucleases, guide nucleic acids, and complexes thereof. Certain programmable nucleases provided herein comprise a RuvC domain. Also provided herein are nucleic acids encoding said programmable nucleases and guide nucleic acids. Also provided herein are methods of genome editing, methods of regulating gene expression, and methods of detecting nucleic acids with said programmable nucleases and guide nucleic acids.

### CROSS-REFERENCE

[0001] The present application is a continuation of U.S. application Ser. No. 17/819,137, filed Aug. 11, 2022, which is a continuation of International Patent Application No. PCT/US2021/035781, filed Jun. 3, 2021, which claims priority to and benefit from U.S. Provisional Application No. 63/034,346, filed on Jun. 3, 2020, U.S. Provisional Application No. 63/037,535, filed on Jun. 10, 2020, U.S. Provisional Application No. 63/040,998, filed on Jun. 18, 2020, U.S. Provisional Application No. 63/092,481, filed on Oct. 15, 2020, U.S. Provisional Application No. 63/116,083, filed on Nov. 19, 2020, U.S. Provisional Application No. 63/124,676, filed on Dec. 11, 2020, U.S. Provisional Application No. 63/156,883, filed on Mar. 4, 2021, and U.S. Provisional Application No. 63/178,472, filed on Apr. 22, 2021, the entire contents of each of which are herein incorporated by reference.

### SEQUENCE LISTING

[0002] This application incorporates by reference a Sequence Listing XML submitted via the USPTO patent electronic filing system. The Sequence Listing XML, entitled 203477-734302-US_SL.xml, was created on Apr. 17, 2024, and is 2,636,471 bytes in size.

### BACKGROUND

[0003] Certain programmable nucleases can be used for genome editing of nucleic acid sequences or detection of nucleic acid sequences. There is a need for high efficiency, programmable nucleases that are capable of working under various sample conditions and can be used for both genome editing and diagnostics.

### SUMMARY

[0004] In various aspects, the present disclosure provides a composition comprising: a) a programmable CasΦ nuclease or a nucleic acid encoding said programmable CasΦ nuclease, wherein said programmable CasΦ nuclease comprises at least 85% sequence identity to a sequence selected from the group consisting of SEQ ID NOs: 1 to 47, SEQ ID NO. 105, and SEQ ID NO. 107, and b) a guide nucleic acid or a nucleic acid encoding said guide nucleic acid, wherein said guide nucleic acid comprises a region comprising a nucleotide sequence that is complementary to a target nucleic acid sequence and an additional region, wherein said region and said additional region are heterologous to each other.

[0005] In some aspects, the additional region of the guide nucleic acid comprises at least 85% sequence identity to a sequence selected from the group consisting of SEQ ID NOs: 48 to 86. In some aspects, the guide nucleic acid comprises a sequence comprising at least 95% sequence identity to a sequence selected from the group consisting of SEQ ID NOs: 48 to 86. In some aspects, the guide nucleic acid comprises a sequence selected from the group consisting of SEQ ID NOs: 48 to 86. In some aspects, the programmable CasΦ nuclease comprises nickase activity. In some aspects, the programmable CasΦ nuclease comprises double-strand cleavage activity. In some aspects, the programmable CasΦ nuclease comprises at least 90% sequence identity to a sequence selected from the group consisting of SEQ ID NOs: 1 to 47, SEQ ID NO. 105, and SEQ ID NO. 107.

[0006] In some aspects, the programmable CasΦ nuclease comprises at least 95% sequence identity to a sequence selected from the group consisting of SEQ ID NOs: 1 to 47, SEQ ID NO. 105, and SEQ ID NO. 107. In some aspects, the programmable CasΦ nuclease comprises at least 98% sequence identity to a sequence selected from the group consisting of SEQ ID NOs: 1 to 47, SEQ ID NO. 105, and SEQ ID NO. 107. In some aspects, the programmable CasΦ nuclease comprises a sequence selected from the group consisting of SEQ ID NOs: 1 to 47, SEQ ID NO. 105, and SEQ ID NO. 107. In some aspects, the guide nucleic acid does not comprise a tracrRNA. In some aspects, the programmable CasΦ nuclease does not require a tracrRNA. In some aspects, the programmable CasΦ nuclease comprises greater nickase activity when complexed with the guide nucleic acid at a temperature from about 20° C. to about 25° C., as compared with complex formation at a temperature of about 37° C. In some aspects, the guide nucleic acid comprises at least 98% sequence identity to SEQ ID NO: 54. In some aspects, the guide nucleic acid comprises at least 98% sequence identity to SEQ ID NO: 57. In some aspects, the programmable CasΦ nuclease comprises greater nickase activity when complexed with the guide nucleic acid comprising a sequence comprising at least 98% sequence identity to SEQ ID NO: 57, as compared to when complexed with a guide nucleic acid comprising SEQ ID NO: 49.

[0007] In some aspects, the programmable CasΦ nuclease exhibits greater nicking activity as compared to double stranded cleavage activity. In some aspects, the programmable CasΦ nuclease exhibits greater double stranded cleavage activity as compared to nicking activity. In some aspects, the programmable CasΦ nuclease comprises a single active site in a RuvC domain that is capable of catalyzing pre-crRNA processing and nicking or cleaving of nucleic acids. In some aspects, the programmable CasΦ nuclease recognizes a protospacer adjacent motif (PAM) of 5′-TBN-3′, wherein B is one or more of C, G, or, T. In some aspects, the programmable CasΦ nuclease recognizes a protospacer adjacent motif (PAM) of 5′-TTTN-3′.

[0008] In various aspects, the present disclosure provides a method of modifying a target nucleic acid sequence, the method comprising: contacting a target nucleic acid sequence with a programmable CasΦ nuclease comprising at least 85% sequence identity to a sequence selected from the group consisting of SEQ ID NOs: 1 to 47, SEQ ID NO. 105, and SEQ ID NO. 107, and a guide nucleic acid, wherein the programmable CasΦ nuclease cleaves the target nucleic acid sequence, thereby modifying the target nucleic acid sequence.

[0009] In some aspects, the programmable CasΦ nuclease introduces a double-stranded break in the target nucleic acid sequence. In some aspects, the programmable CasΦ nuclease comprises double-strand cleavage activity. In some aspects, the programmable CasΦ nuclease cleaves a single-strand of the target nucleic acid sequence. In some aspects, the programmable CasΦ nuclease comprises nickase activity. In some aspects, the programmable CasΦ nuclease exhibits greater nicking activity as compared to double stranded cleavage activity. In some aspects, the programmable CasΦ nuclease exhibits greater double stranded cleavage activity as compared to nicking activity. In some aspects, the target nucleic acid is DNA. In some aspects, the target nucleic acid is double-stranded DNA. In some aspects, the programmable CasΦ nuclease cleaves a non-target strand of the double-stranded DNA, wherein the non-target strand is non-complementary to the guide nucleic acid. In some aspects, the programmable CasΦ nuclease does not cleave a target strand of the double-stranded DNA, wherein the target strand is complementary to the guide nucleic acid.

[0010] In some aspects, the programmable CasΦ nuclease comprises at least 90% sequence identity to a sequence selected from the group consisting of SEQ ID NOs: 1 to 47, SEQ ID NO. 105, and SEQ ID NO. 107. In some aspects, the programmable CasΦ nuclease comprises at least 95% sequence identity to a sequence selected from the group consisting of SEQ ID NOs: 1 to 47, SEQ ID NO. 105, and SEQ ID NO. 107. In some aspects, the programmable CasΦ nuclease comprises at least 98% sequence identity to a sequence selected from the group consisting of SEQ ID NOs: 1 to 47, SEQ ID NO. 105, and SEQ ID NO. 107. In some aspects, the programmable CasΦ nuclease comprises a sequence selected from the group consisting of SEQ ID NOs: 1 to 47, SEQ ID NO. 105, and SEQ ID NO. 107. In some aspects, the guide nucleic acid comprises a sequence comprising at least 85% sequence identity to a sequence selected from the group consisting of SEQ ID NOs: 48 to 86. In some aspects, the guide nucleic acid comprises a sequence comprising at least 95% sequence identity to a sequence selected from the group consisting of SEQ ID NOs: 48 to 86. In some aspects, the guide nucleic acid comprises a sequence selected from the group consisting of SEQ ID NOs: 48 to 86.

[0011] In some aspects, the guide nucleic acid does not comprise a tracrRNA. In some aspects, the target nucleic acid sequence comprises a mutated sequence or a sequence associated with a disease. In some aspects, the mutated sequence is removed after the programmable CasΦ nuclease cleaves the target nucleic acid sequence. In some aspects, the target nucleic acid sequence is in a human cell. In some aspects, the method is performed in vivo. In some aspects, the method is performed ex vivo. In some aspects, the method further comprises inserting a donor polynucleotide into the target nucleic acid sequence at the site of cleavage.

[0012] In various aspects, the present disclosure provides a method of introducing a break in a target nucleic acid, the method comprising: contacting the target nucleic acid with: (a) a first guide nucleic acid comprising a region that binds to a first programmable nickase comprising at least 85% sequence identity to a sequence selected from the group consisting of SEQ ID NOs: 1 to 47, SEQ ID NO. 105, and SEQ ID NO. 107; and (b) a second guide nucleic acid comprising a region that binds to a second programmable nickase comprising at least 85% sequence identity to a sequence selected from the group consisting of SEQ ID NOs: 1 to 47, SEQ ID NO. 105, and SEQ ID NO. 107, wherein the first guide nucleic acid comprises a first additional region that binds to the target nucleic acid and wherein the second guide nucleic acid comprises a second additional region that binds to the target nucleic acid and wherein the first additional region of the first guide nucleic acid and the second additional region of the second guide nucleic acid bind opposing strands of the target nucleic acid. In some aspects, the first programmable nickase, the second programmable nickase, or both comprise at least 90% sequence identity to a sequence selected from the group consisting of SEQ ID NOs: 1 to 47, SEQ ID NO. 105, and SEQ ID NO. 107.

[0013] In some aspects, the first programmable nickase, the second programmable nickase, or both comprise at least 95% sequence identity to a sequence selected from the group consisting of SEQ ID NOs: 1 to 47, SEQ ID NO. 105, and SEQ ID NO. 107. In some aspects, the first programmable nickase, the second programmable nickase, or both comprise a sequence selected from the group consisting of SEQ ID NOs: 1 to 47, SEQ ID NO. 105, and SEQ ID NO. 107. In some aspects, the first guide nucleic acid, the second guide nucleic acid, or both comprise a sequence comprising at least 85% sequence identity to a sequence selected from the group consisting of SEQ ID NOs: 48 to 86. In some aspects, the first guide nucleic acid, the second guide nucleic acid, or both comprise a sequence comprising at least 95% sequence identity to a sequence selected from the group consisting of SEQ ID NOs: 48 to 86. In some aspects, the first guide nucleic acid, the second guide nucleic acid, or both comprise a sequence selected from the group consisting of SEQ ID NOs: 48 to 86.

[0014] In some aspects, the first programmable nickase and the second programmable nickase exhibit greater nicking activity as compared to double stranded cleavage activity. In some aspects, the first programmable nickase and the second programmable nickase nick the target nucleic acid at two different sites. In some aspects, the target nucleic acid comprises double stranded DNA. In some aspects, the two different sites are on opposing strands of the double stranded DNA. In some aspects, the target nucleic acid comprises a mutated sequence or a sequence is associated with a disease. In some aspects, the mutated sequence is removed after the first programmable nickase and the second programmable nickase nick the target nucleic acid. In some aspects, the target nucleic acid is in a cell. In some aspects, the method is performed in vivo. In some aspects, the method is performed ex vivo. In some aspects, the first programmable nickase and the second programmable nickase are the same. In some aspects, the first programmable nickase and the second programmable nickase are different.

[0015] In various aspects, the present disclosure provides a method of detecting a target nucleic acid in a sample, the method comprising contacting a sample comprising a target nucleic acid with (a) a programmable CasΦ nuclease comprising at least 85% sequence identity to a sequence selected from the group consisting of SEQ ID NOs: 1 to 47, SEQ ID NO. 105, and SEQ ID NO. 107; (b) a guide RNA comprising a region that binds to the programmable CasΦ nuclease and an additional region that binds to the target nucleic acid; and (c) a labeled single stranded DNA reporter that does not bind the guide RNA; cleaving the labeled single stranded DNA reporter by the programmable CasΦ nuclease to release a detectable label; and detecting the target nucleic acid by measuring a signal from the detectable label.

[0016] In some aspects, the target nucleic acid is single stranded DNA. In some aspects, the target nucleic acid is double stranded DNA. In some aspects, the target nucleic acid is a viral nucleic acid. In some aspects, the target nucleic acid is bacterial nucleic acid. In some aspects, the target nucleic acid is from a human cell. In some aspects, the target nucleic acid is a fetal nucleic acid. In some aspects, the sample is derived from a subject's saliva, blood, serum, plasma, urine, aspirate, or biopsy sample. In some aspects, the programmable CasΦ nuclease comprises at least 95% sequence identity to a sequence selected from the group consisting of SEQ ID NOs: 1 to 47, SEQ ID NO. 105, and SEQ ID NO. 107. In some aspects, the programmable CasΦ nuclease comprises a sequence selected from the group consisting of SEQ ID NOs: 1 to 47, SEQ ID NO. 105, and SEQ ID NO. 107.

[0017] In some aspects, the guide RNA comprises at least about 95% sequence identity to a sequence selected from the group consisting of SEQ ID NOs: 48 to 86. In some aspects, the guide RNA comprises a sequence selected from the group consisting of SEQ ID NOs: 48 to 86. In some aspects, the sample comprises a phosphate buffer, a Tris buffer, or a HEPES buffer. In some aspects, the sample comprises a pH of 7 to 9. In some aspects, the sample comprises a pH of 7.5 to 8. In some aspects, the sample comprises a salt concentration of 25 nM to 200 mM. In some aspects, the single stranded DNA reporter comprises an ssDNA-fluorescence quenching DNA reporter. In some aspects, the ssDNA-fluorescence quenching DNA reporter is a universal ssDNA-fluorescence quenching DNA reporter. In some aspects, the programmable CasΦ nuclease exhibits PAM-independent cleaving.

[0018] In various aspects, the present disclosure provides a method of modulating transcription of a gene in a cell, the method comprising: introducing into a cell comprising a target nucleic acid sequence: (i) a fusion polypeptide or a nucleic acid encoding the fusion polypeptide, wherein the fusion polypeptide comprises: (a) a dCasΦ polypeptide comprising at least 85% sequence identity to a sequence selected from the group consisting of SEQ ID NOs: 1 to 47, SEQ ID NO. 105, and SEQ ID NO. 107, wherein the dCasΦ polypeptide is enzymatically inactive; and (b) a polypeptide comprising transcriptional regulation activity; and (ii) a guide nucleic acid, or a nucleic acid comprising a nucleotide sequence encoding the guide nucleic acid, wherein the guide nucleic acid comprises a region that binds to the dCasΦ polypeptide and an additional region that binds to the target nucleic acid; wherein transcription of the gene is modulated through the fusion polypeptide acting on the target nucleic acid sequence.

[0019] In some aspects, the dCasΦ polypeptide comprises at least 95% sequence identity to a sequence selected from the group consisting of SEQ ID NOs: 1 to 47, SEQ ID NO. 105, and SEQ ID NO. 107. In some aspects, the guide nucleic acid comprises at least about 95% sequence identity to a sequence selected from the group consisting of SEQ ID NOs: 48 to 86. In some aspects, the guide nucleic acid comprises a sequence selected from the group consisting of SEQ ID NOs: 48 to 86. In some aspects, the guide nucleic acid comprises a sequence selected from the group consisting of SEQ ID NOs: 48 to 86. In some aspects, the polypeptide comprising transcriptional regulation activity polypeptide comprises transcription activation activity.

[0020] In some aspects, the polypeptide comprising transcriptional regulation activity polypeptide comprises transcription repressor activity. In some aspects, the polypeptide comprising transcriptional regulation activity polypeptide comprises an activity selected from the group consisting of transcription activation activity, transcription repression activity, nuclease activity, transcription release factor activity, histone modification activity, histone acetyltransferase activity, nucleic acid association activity, DNA methylase activity, direct or indirect DNA demethylase activity, methyltransferase activity, demethylase activity, acetyltransferase activity, deacetylase activity, kinase activity, phosphatase activity, ubiquitin ligase activity, deubiquitinating activity, adenylation activity, deadenylation activity, deaminase activity, SUMOylating activity, deSUMOylating activity, ribosylation activity, deribosylation activity, myristoylation activity, and demyristoylation activity.

[0021] In various aspects, the present disclosure provides a composition comprising: a) a Cas nuclease or nucleic acid encoding said Cas nuclease, and b) a guide nucleic acid or a nucleic acid encoding said guide nucleic acid, wherein said guide nucleic acid comprises a region comprising a nucleotide sequence that is complementary to a target nucleic acid sequence and an additional region, wherein said region and said additional region are heterologous to each other; wherein the Cas nuclease comprises a RuvC domain, wherein the RuvC domain is capable of processing a pre-crRNA and cleaving a target nucleic acid. In some aspects, the same active site in the RuvC domain catalyzes the processing of the pre-crRNA and the cleaving of the target nucleic acid. In some aspects, the Cas nuclease is the programmable CasΦ nuclease as disclosed herein. In some aspects, the Cas nuclease recognizes a protospacer adjacent motif (PAM) of 5′-TBN-3′, wherein B is one or more of C, G, or, T. In some aspects, the Cas nuclease recognizes a protospacer adjacent motif (PAM) of 5′-TTTN-3′. In some aspects, the Cas nuclease recognizes a protospacer adjacent motif (PAM) of 5′-TTN-3′. In some aspects, the Cas nuclease recognizes a protospacer adjacent motif (PAM) of 5′-GTTB-3′, wherein B is C, G, or T. In some aspects, the Cas nuclease recognizes a protospacer adjacent motif (PAM) of 5′-GTTK-3′, 5′-VTTK-3′, 5′-VTTS-3′, 5′-TTTS-3′ or 5′-VTTN-3′, where K is G or T, Vis A, C or G, and S is C or G. In some aspects, the composition is used in any of the above methods.

[0022] In various aspects, the present disclosure provides the use of a programmable CasΦ nuclease to modify a target nucleic acid sequence according to any one of the above methods. In various aspects, the present disclosure provides the use of a first programmable nickase and a second programmable nickase to introduce a break in a target nucleic acid according to any one of the above methods. In various aspects, the present disclosure provides the use of a programmable CasΦ nuclease to detect a target nucleic acid in a sample according to any one of the above methods. In various aspects, the present disclosure provides the use of a dCasΦ polypeptide to modulate transcription of a gene in a cell according to any one of the above methods. In some aspects, the region is a spacer region and the additional region is a repeat region. In some aspects, the region is a repeat region and the additional region is a spacer region. In some aspects, the repeat region comprises a GAC sequence, optionally wherein the GAC sequence is at the 3′ end of the repeat region. In some aspects, the repeat region comprises a hairpin, optionally wherein the hairpin is in the 3′ portion of the repeat region. In some aspects, the hairpin comprises a double-stranded stem portion and a single-stranded loop portion. In some aspects, a strand of the stem portion comprises a CYC sequence and the other strand of the stem portion comprises a GRG sequence, wherein Y and R are complementary. In some aspects, the G of the GAC sequence is in the stem portion of the hairpin. In some aspects, each strand of the stem portion comprises 3, 4 or 5 nucleotides. In some aspects, the loop portion comprises between 2 and 8 nucleotides, optionally wherein the loop portion comprises 4 nucleotides. In some aspects, the guide nucleic acid comprises at least 98% sequence identity to SEQ ID NO: 54.

[0023] In some aspects, the repeat region is between 15 and 50 nucleotides in length, preferably, wherein the repeat region is between 19 and 37 nucleotides in length. In some aspects, the spacer region is between 15 and 50 nucleotides in length, between 15 and 40 nucleotides in length, or between 15 and 35 nucleotides in length, preferably wherein the spacer region is between 16 and 30 nucleotides in length. In some aspects, the spacer region is between 16 and 20 nucleotides in length. In some aspects, the programmable CasΦ nuclease forms a complex with a divalent metal ion, preferably wherein the divalent metal ion is Mg2+.

[0024] In various aspects, the present disclosure provides a programmable CasΦ nuclease or a nucleic acid encoding said programmable CasΦ nuclease, wherein said programmable CasΦ nuclease comprises at least 85% sequence identity to a sequence selected from the group consisting of SEQ ID NOs: 1 to 47, SEQ ID NO. 105, and SEQ ID NO. 107, and wherein the programmable CasΦ nuclease is capable of binding to a guide RNA comprising a first region that is complementary to a target nucleic acid sequence in a eukaryotic genome and a second region that binds to the programmable CasΦ nuclease; a complex comprising the programmable CasΦ nuclease and the guide RNA binds to the target sequence; the programmable CasΦ nuclease comprises a RuvC domain, wherein the RuvC domain is capable of processing a pre-crRNA and cleaving the target nucleic acid; and the programmable CasΦ nuclease does not require a tracrRNA to cleave the target nucleic acid.

[0025] In various aspects, the present disclosure provides a programmable CasΦ nuclease or a nucleic acid encoding said programmable CasΦ nuclease, wherein said programmable CasΦ nuclease comprises a RuvC-like domain which matches PFAM family PF07282 and does not match PFAM family PF18516, and wherein the programmable CasΦ nuclease is capable of binding to a guide RNA comprising a first region that is complementary to a target nucleic acid sequence in a eukaryotic genome and a second region that binds to the programmable CasΦ nuclease; a complex comprising the programmable CasΦ nuclease and the guide RNA binds to the target sequence; the RuvC-like domain is capable of processing a pre-crRNA and cleaving the target nucleic acid; and the programmable CasΦ nuclease does not require a tracrRNA to cleave the target nucleic acid.

[0026] In various aspects, the present disclosure provides a programmable CasΦ nuclease or a nucleic acid encoding said programmable CasΦ nuclease, wherein said programmable CasΦ nuclease comprises at least 85% sequence identity to a sequence selected from the group consisting of SEQ ID NOs: 1 to 47, SEQ ID NO. 105, or SEQ ID NO. 107, and wherein a) the programmable CasΦ nuclease comprises a RuvC-like domain which matches PFAM family PF07282 and does not match PFAM family PF18516; b) the programmable CasΦ nuclease is capable of binding to a guide RNA comprising a first region that is complementary to a target nucleic acid sequence in a eukaryotic genome and a second region that binds to the programmable CasΦ nuclease; c) a complex comprising the programmable CasΦ nuclease and the guide RNA binds to the target sequence; d) the RuvC-like domain is capable of processing a pre-crRNA and cleaving the target nucleic acid; and e) the programmable CasΦ nuclease does not require a tracrRNA to cleave the target nucleic acid.

[0027] In some aspects, the same active site in the RuvC domain or RuvC-like domain catalyzes the processing of the pre-crRNA and the cleaving of the target nucleic acid. In some aspects, the programmable CasΦ nuclease is fused or linked to one or more NLS. In some aspects, the one or more NLS are fused or linked to the N-terminus of the programmable CasΦ nuclease; the one or more NLS are fused or linked to the C-terminus of the programmable CasΦ nuclease; or the one or more NLS are fused or linked to the N-terminus and the C-terminus of the programmable CasΦ nuclease. In some cases, an aspect comprises the programmable CasΦ nuclease or a nucleic acid described herein and a gRNA comprising a first region that is complementary to a target nucleic acid sequence in a eukaryotic genome and a second region that binds to the programmable CasΦ nuclease.

[0028] In some cases, an aspect comprises the programmable CasΦ nuclease or a nucleic acid described herein and a cell, preferably wherein the cell is a eukaryotic cell. In some cases, an aspect comprises the programmable CasΦ nuclease or a nucleic acid described herein and a gRNA comprising a first region that is complementary to a target nucleic acid sequence in a eukaryotic genome and a second region that binds to the programmable CasΦ nuclease and a cell, preferably wherein the cell is a eukaryotic cell. In some cases, an aspect comprises a eukaryotic cell comprising the programmable CasΦ nuclease or a nucleic acid described herein.

[0029] In some aspects, the cell further comprises a gRNA comprising a first region that is complementary to a target nucleic acid sequence in a eukaryotic genome and a second region that binds to the programmable CasΦ nuclease and a cell, preferably wherein the cell is a eukaryotic cell.

[0030] In some cases, an aspect comprises a vector comprising a nucleic acid described herein. In some aspects, the vector is a viral vector.

[0031] In some aspects, the programmable CasΦ nuclease recognizes a protospacer adjacent motif (PAM) of 5′-TTN-3′. In some aspects, the programmable CasΦ nuclease recognizes a protospacer adjacent motif (PAM) of 5′-GTTB-3′, wherein B is C, G, or T. In some aspects, the Cas nuclease recognizes a protospacer adjacent motif (PAM) of 5′-TTN-3′, optionally wherein the PAM is 5′-TTN-3′. In some aspects, the Cas nuclease recognizes a protospacer adjacent motif (PAM) of 5′-GTTK-3′, 5′-VTTK-3′, 5′-VTTS-3′, 5′-TTTS-3′ or 5′-VTTN-3′, where K is G or T, Vis A, C or G, and S is C or G. In some aspects, the Cas nuclease recognizes a protospacer adjacent motif (PAM) of 5′-GTTB-3′, wherein B is C, G, or T.

[0032] In various aspects, the present disclosure provides a programmable CasΦ nuclease or a nucleic acid encoding said programmable CasΦ nuclease, wherein said programmable CasΦ nuclease comprises at least 85% sequence identity to a sequence selected from the group consisting of SEQ ID NOs: 1 to 47, SEQ ID NO. 105, and SEQ ID NO. 107, and wherein the programmable CasΦ nuclease is capable of binding to a guide RNA comprising a first region that is complementary to a target nucleic acid sequence in a eukaryotic genome and a second region that binds to the programmable CasΦ nuclease; a complex comprising the programmable CasΦ nuclease and the guide RNA binds to the target sequence; the programmable CasΦ nuclease comprises a RuvC domain, wherein the RuvC domain is capable of processing a pre-crRNA and cleaving the target nucleic acid; the programmable CasΦ nuclease cleaves both strands of the target nucleic acid comprising the target sequence, wherein the strand break is a staggered cut with a 5′ overhang; and the programmable CasΦ nuclease does not require a tracrRNA to cleave the target nucleic acid.

[0033] In various aspects, the present disclosure provides a programmable CasΦ nuclease or a nucleic acid encoding said programmable CasΦ nuclease, wherein said programmable CasΦ nuclease comprises a RuvC-like domain which matches PFAM family PF07282 and does not match PFAM family PF18516, and wherein the programmable CasΦ nuclease is capable of binding to a guide RNA comprising a first region that is complementary to a target nucleic acid sequence in a eukaryotic genome and a second region that binds to the programmable CasΦ nuclease; a complex comprising the programmable CasΦ nuclease and the guide RNA binds to the target sequence; the RuvC-like domain is capable of processing a pre-crRNA and cleaving the target nucleic acid; the programmable CasΦ nuclease cleaves both strands of the target nucleic acid comprising the target sequence, wherein the strand break is a staggered cut with a 5′ overhang; and the programmable CasΦ nuclease does not require a tracrRNA to cleave the target nucleic acid.

[0034] In various aspects, the present disclosure provides a programmable nuclease or a nucleic acid encoding said programmable nuclease, wherein said programmable nuclease is a Type V CRISPR/Cas enzyme nuclease and comprises between 400 and 900 amino acids, and wherein the programmable CasΦ nuclease is capable of binding to a guide RNA comprising a first region that is complementary to a target nucleic acid sequence in a eukaryotic genome and a second region that binds to the programmable CasΦ nuclease; a complex comprising the programmable CasΦ nuclease and the guide RNA binds to the target sequence; the programmable CasΦ nuclease comprises a RuvC domain, wherein the RuvC domain is capable of processing a pre-crRNA and cleaving the target nucleic acid; the programmable CasΦ nuclease cleaves both strands of the target nucleic acid comprising the target sequence, wherein the strand break is a staggered cut with a 5′ overhang; and the programmable CasΦ nuclease does not require a tracrRNA to cleave the target nucleic acid.

[0035] In various aspects, the present disclosure provides a programmable CasΦ nuclease or a nucleic acid encoding said programmable CasΦ nuclease, wherein said programmable CasΦ nuclease comprises at least 85% sequence identity to a sequence selected from the group consisting of SEQ ID NOs: 1 to 47, SEQ ID NO. 105, and SEQ ID NO. 107, and wherein the programmable CasΦ nuclease is capable of binding to a guide RNA comprising a first region that is complementary to a target nucleic acid sequence in a eukaryotic genome and a second region that binds to the programmable CasΦ nuclease; a complex comprising the programmable CasΦ nuclease and the guide RNA binds to the target sequence; the programmable CasΦ nuclease comprises a RuvC domain, wherein the RuvC domain is capable of processing a pre-crRNA and cleaving the target nucleic acid; the programmable CasΦ nuclease is capable of cleaving the second region of the guide RNA in mammalian cells; and the programmable CasΦ nuclease does not require a tracrRNA to cleave the target nucleic acid.

[0036] In various aspects, the present disclosure provides a programmable CasΦ nuclease or a nucleic acid encoding said programmable CasΦ nuclease, wherein said programmable CasΦ nuclease comprises a RuvC-like domain which matches PFAM family PF07282 and does not match PFAM family PF18516, and wherein the programmable CasΦ nuclease is capable of binding to a guide RNA comprising a first region that is complementary to a target nucleic acid sequence in a eukaryotic genome and a second region that binds to the programmable CasΦ nuclease; a complex comprising the programmable CasΦ nuclease and the guide RNA binds to the target sequence; the RuvC-like domain is capable of processing a pre-crRNA and cleaving the target nucleic acid; the programmable CasΦ nuclease is capable of cleaving the second region of the guide RNA in mammalian cells; and the programmable CasΦ nuclease does not require a tracrRNA to cleave the target nucleic acid.

[0037] In various aspects, the present disclosure provides a programmable nuclease or a nucleic acid encoding said programmable nuclease, wherein said programmable nuclease is a Type V CRISPR/Cas enzyme nuclease and comprises between 400 and 900 amino acids, and wherein the programmable CasΦ nuclease is capable of binding to a guide RNA comprising a first region that is complementary to a target nucleic acid sequence in a eukaryotic genome and a second region that binds to the programmable CasΦ nuclease; a complex comprising the programmable CasΦ nuclease and the guide RNA binds to the target sequence; the RuvC-like domain is capable of processing a pre-crRNA and cleaving the target nucleic acid; the programmable CasΦ nuclease is capable of cleaving the second region of the guide RNA in mammalian cells; and the programmable CasΦ nuclease does not require a tracrRNA to cleave the target nucleic acid.

[0038] In various aspects, the present disclosure provides a programmable CasΦ nuclease or a nucleic acid encoding said programmable CasΦ nuclease, wherein said programmable CasΦ nuclease comprises at least 85% sequence identity to a sequence selected from the group consisting of SEQ ID NOs: 1 to 47, SEQ ID NO. 105, and SEQ ID NO. 107, and wherein the programmable CasΦ nuclease is capable of binding to a guide RNA comprising a first region that is complementary to a target nucleic acid sequence in a eukaryotic genome and a second region that binds to the programmable CasΦ nuclease; a complex comprising the programmable CasΦ nuclease and the guide RNA binds to the target sequence; the programmable CasΦ nuclease comprises a RuvC domain, wherein the RuvC domain is capable of processing a pre-crRNA and cleaving the target nucleic acid; the programmable CasΦ nuclease cleaves both strands of a target nucleic acid comprising the target sequence, wherein the strand break is a staggered cut with a 5′ overhang; the programmable CasΦ nuclease is capable of cleaving the second region of the guide RNA in mammalian cells; and the programmable CasΦ nuclease does not require a tracrRNA to cleave the target nucleic acid.

[0039] In various aspects, the present disclosure provides a programmable CasΦ nuclease or a nucleic acid encoding said programmable CasΦ nuclease, wherein said programmable CasΦ nuclease comprises a RuvC-like domain which matches PFAM family PF07282 and does not match PFAM family PF18516, and wherein the programmable CasΦ nuclease is capable of binding to a guide RNA comprising a first region that is complementary to a target nucleic acid sequence in a eukaryotic genome and a second region that binds to the programmable CasΦ nuclease; a complex comprising the programmable CasΦ nuclease and the guide RNA binds to the target sequence; the RuvC-like domain is capable of processing a pre-crRNA and cleaving the target nucleic acid; the programmable CasΦ nuclease cleaves both strands of a target nucleic acid comprising the target sequence, wherein the strand break is a staggered cut with a 5′ overhang; the programmable CasΦ nuclease is capable of cleaving the second region of the guide RNA in mammalian cells; and the programmable CasΦ nuclease does not require a tracrRNA to cleave the target nucleic acid.

[0040] In various aspects, the present disclosure provides a programmable nuclease or a nucleic acid encoding said programmable nuclease, wherein said programmable nuclease is a Type V CRISPR/Cas enzyme nuclease and comprises between 400 and 900 amino acids, and wherein the programmable CasΦ nuclease is capable of binding to a guide RNA comprising a first region that is complementary to a target nucleic acid sequence in a eukaryotic genome and a second region that binds to the programmable CasΦ nuclease; a complex comprising the programmable CasΦ nuclease and the guide RNA binds to the target sequence; the RuvC-like domain is capable of processing a pre-crRNA and cleaving the target nucleic acid; the programmable CasΦ nuclease cleaves both strands of a target nucleic acid comprising the target sequence, wherein the strand break is a staggered cut with a 5′ overhang; the programmable CasΦ nuclease is capable of cleaving the second region of the guide RNA in mammalian cells; and the programmable CasΦ nuclease does not require a tracrRNA to cleave the target nucleic acid.

[0041] In various aspects, the present disclosure provides a programmable CasΦ nuclease or a nucleic acid encoding said programmable CasΦ nuclease, wherein said programmable CasΦ nuclease comprises at least 85% sequence identity to a sequence selected from the group consisting of SEQ ID NOs: 1 to 47, SEQ ID NO. 105, and SEQ ID NO. 107, and wherein the programmable CasΦ nuclease is capable of binding to a guide RNA comprising a first region that is complementary to a target nucleic acid sequence in a eukaryotic genome and a second region that binds to the programmable CasΦ nuclease, wherein the first region comprises a seed region comprising between 10 and 16 nucleosides; a complex comprising the programmable CasΦ nuclease and the guide RNA binds to the target sequence; the programmable CasΦ nuclease comprises a RuvC domain, wherein the RuvC domain is capable of processing a pre-crRNA and cleaving the target nucleic acid; and the programmable CasΦ nuclease does not require a tracrRNA to cleave the target nucleic acid.

[0042] In various aspects, the present disclosure provides a programmable CasΦ nuclease or a nucleic acid encoding said programmable CasΦ nuclease, wherein said programmable CasΦ nuclease comprises a RuvC-like domain which matches PFAM family PF07282 and does not match PFAM family PF18516, and wherein the programmable CasΦ nuclease is capable of binding to a guide RNA comprising a first region that is complementary to a target nucleic acid sequence in a eukaryotic genome and a second region that binds to the programmable CasΦ nuclease, wherein the first region comprises a seed region comprising between 10 and 16 nucleosides; a complex comprising the programmable CasΦ nuclease and the guide RNA binds to the target sequence; the RuvC-like domain is capable of processing a pre-crRNA and cleaving the target nucleic acid; and the programmable CasΦ nuclease does not require a tracrRNA to cleave the target nucleic acid.

[0043] In various aspects, the present disclosure provides a programmable nuclease or a nucleic acid encoding said programmable nuclease, wherein said programmable nuclease is a Type V CRISPR/Cas enzyme nuclease and comprises between 400 and 900 amino acids, and wherein the programmable CasΦ nuclease is capable of binding to a guide RNA comprising a first region that is complementary to a target nucleic acid sequence in a eukaryotic genome and a second region that binds to the programmable CasΦ nuclease, wherein the first region comprises a seed region comprising between 10 and 16 nucleosides; a complex comprising the programmable CasΦ nuclease and the guide RNA binds to the target sequence; the RuvC-like domain is capable of processing a pre-crRNA and cleaving the target nucleic acid; and the programmable CasΦ nuclease does not require a tracrRNA to cleave the target nucleic acid.

[0044] In various aspects, the present disclosure provides a programmable CasΦ nuclease or a nucleic acid encoding said programmable CasΦ nuclease, wherein said programmable CasΦ nuclease comprises at least 85% sequence identity to a sequence selected from the group consisting of SEQ ID NOs: 1 to 47, SEQ ID NO. 105, and SEQ ID NO. 107, and wherein the programmable CasΦ nuclease is capable of binding to a guide RNA comprising a first region that is complementary to a target nucleic acid sequence in a eukaryotic genome and a second region that binds to the programmable CasΦ nuclease, wherein the first region comprises a seed region comprising between 10 and 16 nucleosides; a complex comprising the programmable CasΦ nuclease and the guide RNA binds to the target sequence; the programmable CasΦ nuclease comprises a RuvC domain, wherein the RuvC domain is capable of processing a pre-crRNA and cleaving the target nucleic acid; the programmable CasΦ nuclease cleaves both strands of the target nucleic acid comprising the target sequence, wherein the strand break is a staggered cut with a 5′ overhang; and the programmable CasΦ nuclease does not require a tracrRNA to cleave the target nucleic acid.

[0045] In various aspects, the present disclosure provides a programmable CasΦ nuclease or a nucleic acid encoding said programmable CasΦ nuclease, wherein said programmable CasΦ nuclease comprises a RuvC-like domain which matches PFAM family PF07282 and does not match PFAM family PF18516, and wherein the programmable CasΦ nuclease is capable of binding to a guide RNA comprising a first region that is complementary to a target nucleic acid sequence in a eukaryotic genome and a second region that binds to the programmable CasΦ nuclease, wherein the first region comprises a seed region comprising between 10 and 16 nucleosides; a complex comprising the programmable CasΦ nuclease and the guide RNA binds to the target sequence; the RuvC-like domain is capable of processing a pre-crRNA and cleaving the target nucleic acid; the programmable CasΦ nuclease cleaves both strands of the target nucleic acid comprising the target sequence, wherein the strand break is a staggered cut with a 5′ overhang; and the programmable CasΦ nuclease does not require a tracrRNA to cleave the target nucleic acid.

[0046] In various aspects, the present disclosure provides a programmable nuclease or a nucleic acid encoding said programmable nuclease, wherein said programmable nuclease is a Type V CRISPR/Cas enzyme nuclease and comprises between 400 and 900 amino acids, and wherein the programmable CasΦ nuclease is capable of binding to a guide RNA comprising a first region that is complementary to a target nucleic acid sequence in a eukaryotic genome and a second region that binds to the programmable CasΦ nuclease, wherein the first region comprises a seed region comprising between 10 and 16 nucleosides; a complex comprising the programmable CasΦ nuclease and the guide RNA binds to the target sequence; the RuvC-like domain is capable of processing a pre-crRNA and cleaving the target nucleic acid; the programmable CasΦ nuclease cleaves both strands of the target nucleic acid comprising the target sequence, wherein the strand break is a staggered cut with a 5′ overhang; and the programmable CasΦ nuclease does not require a tracrRNA to cleave the target nucleic acid.

[0047] In various aspects, the present disclosure provides a programmable CasΦ nuclease or a nucleic acid encoding said programmable CasΦ nuclease, wherein said programmable CasΦ nuclease comprises at least 85% sequence identity to a sequence selected from the group consisting of SEQ ID NOs: 1 to 47, SEQ ID NO. 105, and SEQ ID NO. 107, and wherein the programmable CasΦ nuclease is capable of binding to a guide RNA comprising a first region that is complementary to a target nucleic acid sequence in a eukaryotic genome and a second region that binds to the programmable CasΦ nuclease, wherein the first region comprises a seed region comprising between 10 and 16 nucleosides; a complex comprising the programmable CasΦ nuclease and the guide RNA binds to the target sequence; the programmable CasΦ nuclease comprises a RuvC domain, wherein the RuvC domain is capable of processing a pre-crRNA and cleaving the target nucleic acid; the programmable CasΦ nuclease is capable of cleaving the second region of the guide RNA in mammalian cells; and the programmable CasΦ nuclease does not require a tracrRNA to cleave the target nucleic acid.

[0048] In various aspects, the present disclosure provides a programmable CasΦ nuclease or a nucleic acid encoding said programmable CasΦ nuclease, wherein said programmable CasΦ nuclease comprises a RuvC-like domain which matches PFAM family PF07282 and does not match PFAM family PF18516, and wherein the programmable CasΦ nuclease is capable of binding to a guide RNA comprising a first region that is complementary to a target nucleic acid sequence in a eukaryotic genome and a second region that binds to the programmable CasΦ nuclease, wherein the first region comprises a seed region comprising between 10 and 16 nucleosides; a complex comprising the programmable CasΦ nuclease and the guide RNA binds to the target sequence; the RuvC-like domain is capable of processing a pre-crRNA and cleaving the target nucleic acid; the programmable CasΦ nuclease is capable of cleaving the second region of the guide RNA in mammalian cells; and the programmable CasΦ nuclease does not require a tracrRNA to cleave the target nucleic acid.

[0049] In various aspects, the present disclosure provides a programmable nuclease or a nucleic acid encoding said programmable nuclease, wherein said programmable nuclease is a Type V CRISPR/Cas enzyme nuclease and comprises between 400 and 900 amino acids, and wherein the programmable CasΦ nuclease is capable of binding to a guide RNA comprising a first region that is complementary to a target nucleic acid sequence in a eukaryotic genome and a second region that binds to the programmable CasΦ nuclease, wherein the first region comprises a seed region comprising between 10 and 16 nucleosides; a complex comprising the programmable CasΦ nuclease and the guide RNA binds to the target sequence; the RuvC-like domain is capable of processing a pre-crRNA and cleaving the target nucleic acid; the programmable CasΦ nuclease is capable of cleaving the second region of the guide RNA in mammalian cells; and the programmable CasΦ nuclease does not require a tracrRNA to cleave the target nucleic acid.

[0050] In various aspects, the present disclosure provides a programmable CasΦ nuclease or a nucleic acid encoding said programmable CasΦ nuclease, wherein said programmable CasΦ nuclease comprises at least 85% sequence identity to a sequence selected from the group consisting of SEQ ID NOs: 1 to 47, SEQ ID NO. 105, and SEQ ID NO. 107, and wherein the programmable CasΦ nuclease is capable of binding to a guide RNA comprising a first region that is complementary to a target nucleic acid sequence in a eukaryotic genome and a second region that binds to the programmable CasΦ nuclease, wherein the first region comprises a seed region comprising between 10 and 16 nucleosides; a complex comprising the programmable CasΦ nuclease and the guide RNA binds to the target sequence; the programmable CasΦ nuclease comprises a RuvC domain, wherein the RuvC domain is capable of processing a pre-crRNA and cleaving the target nucleic acid; the programmable CasΦ nuclease cleaves both strands of a target nucleic acid comprising the target sequence, wherein the strand break is a staggered cut with a 5′ overhang; the programmable CasΦ nuclease is capable of cleaving the second region of the guide RNA in mammalian cells; and the programmable CasΦ nuclease does not require a tracrRNA to cleave the target nucleic acid.

[0051] In various aspects, the present disclosure provides a programmable CasΦ nuclease or a nucleic acid encoding said programmable CasΦ nuclease, wherein said programmable CasΦ nuclease comprises a RuvC-like domain which matches PFAM family PF07282 and does not match PFAM family PF18516, and wherein the programmable CasΦ nuclease is capable of binding to a guide RNA comprising a first region that is complementary to a target nucleic acid sequence in a eukaryotic genome and a second region that binds to the programmable CasΦ nuclease, wherein the first region comprises a seed region comprising between 10 and 16 nucleosides; a complex comprising the programmable CasΦ nuclease and the guide RNA binds to the target sequence; the RuvC-like domain is capable of processing a pre-crRNA and cleaving the target nucleic acid; the programmable CasΦ nuclease cleaves both strands of a target nucleic acid comprising the target sequence, wherein the strand break is a staggered cut with a 5′ overhang; the programmable CasΦ nuclease is capable of cleaving the second region of the guide RNA in mammalian cells; and the programmable CasΦ nuclease does not require a tracrRNA to cleave the target nucleic acid.

[0052] In various aspects, the present disclosure provides a programmable nuclease or a nucleic acid encoding said programmable nuclease, wherein said programmable nuclease is a Type V CRISPR/Cas enzyme nuclease and comprises between 400 and 900 amino acids, and wherein the programmable CasΦ nuclease is capable of binding to a guide RNA comprising a first region that is complementary to a target nucleic acid sequence in a eukaryotic genome and a second region that binds to the programmable CasΦ nuclease, wherein the first region comprises a seed region comprising between 10 and 16 nucleosides; a complex comprising the programmable CasΦ nuclease and the guide RNA binds to the target sequence; the RuvC-like domain is capable of processing a pre-crRNA and cleaving the target nucleic acid; the programmable CasΦ nuclease cleaves both strands of a target nucleic acid comprising the target sequence, wherein the strand break is a staggered cut with a 5′ overhang; the programmable CasΦ nuclease is capable of cleaving the second region of the guide RNA in mammalian cells; and the programmable CasΦ nuclease does not require a tracrRNA to cleave the target nucleic acid. In some aspects the same active site in the RuvC domain or RuvC-like domain catalyzes the processing of the pre-crRNA and the cleaving of the target nucleic acid.

[0053] In some aspects, the programmable CasΦ nuclease is fused or linked to one or more NLS. In some aspects, the one or more NLS are fused or linked to the N-terminus of the programmable CasΦ nuclease; the one or more NLS are fused or linked to the C-terminus of the programmable CasΦ nuclease; or the one or more NLS are fused or linked to the N-terminus and the C-terminus of the programmable CasΦ nuclease.

[0054] In some cases, an aspect comprises the programmable CasΦ nuclease or a nucleic acid described herein and a gRNA comprising a first region that is complementary to a target nucleic acid sequence in a eukaryotic genome and a second region that binds to the programmable CasΦ nuclease. In some aspects, the first region comprises a seed region comprising between 10 and 16 nucleosides. In some aspects, the seed region comprises 16 nucleosides. In some cases, an aspect comprises the programmable CasΦ nuclease or a nucleic acid described herein and a cell, preferably wherein the cell is a eukaryotic cell.

[0055] In some cases, an aspect comprises the programmable CasΦ nuclease or a nucleic acid described herein and a gRNA comprising a first region that is complementary to a target nucleic acid sequence in a eukaryotic genome and a second region that binds to the programmable CasΦ nuclease and a cell, preferably wherein the cell is a eukaryotic cell. In some aspects, the first region comprises a seed region comprising between 10 and 16 nucleosides. In some aspects, the seed region comprises 16 nucleosides.

[0056] In some aspects, a eukaryotic cell comprises the programmable CasΦ nuclease or a nucleic acid described herein. In some aspects, the cell further comprises a gRNA comprising a first region that is complementary to a target nucleic acid sequence in a eukaryotic genome and a second region that binds to the programmable CasΦ nuclease. In some aspects, the first region comprises a seed region comprising between 10 and 16 nucleosides. In some aspects, the seed region comprises 16 nucleosides. In some aspects, a vector comprises a nucleic acid described herein. In some aspects, the vector is a viral vector.

[0057] In various aspects, the present disclosure provides a guide nucleic acid, or a nucleic acid encoding said guide nucleic acid, comprising a sequence that is the same as or differs by no more than 5, 4, 3, 2, or 1 nucleotides from: a sequence from Tables A to AH; or a sequence comprising a repeat sequence from Table 2 and a spacer sequence from Tables A to H. In some aspects, the guide nucleic acid comprises a sequence from Tables A to AH; or a sequence comprising a repeat sequence from Table 2 and a spacer sequence from Tables A to H. In some aspects, the guide nucleic acid comprises RNA and/or DNA. In some aspects, the guide nucleic acid is a guide RNA. Some aspects further comprise a complex comprising the guide nucleic acid and a programmable CasΦ nuclease. Some aspects comprise a eukaryotic cell comprising the guide nucleic acid. In some aspects, the eukaryotic cell further comprises a programmable CasΦ nuclease. Some aspects further comprise a vector encoding the guide nucleic acid. In some aspects, the vector is a viral vector.

[0058] In various aspects, the present disclosure provides a method of introducing a first modification in a first gene and a second modification in a second gene, the method comprising contacting a cell with a CasΦ nuclease; a first guide RNA that is at least partially complementary to an equal length portion of the first gene; and a second guide RNA that is at least partially complementary to an equal length portion of the second gene. In some aspects, the CasΦ nuclease is a CasΦ12 nuclease. In some aspects, the CasΦ12 nuclease comprises or consists of an amino acid sequence of SEQ ID NO: 12. In some aspects, the first and/or second modification comprises an insertion of a nucleotide, a deletion of a nucleotide or a combination thereof. In some aspects, the first and/or second modification comprises an epigenetic modification. In some aspects, the first and/or second mutation results in a reduction in the expression of the first gene and/or second gene, respectively. In some aspects, the reduction in the expression is at least about a 10% reduction, at least about a 20% reduction, at least about a 30% reduction, at least about a 40% reduction, at least about a 50% reduction, at least about a 60% reduction, at least about a 70% reduction, at least about an 80% reduction, or at least about a 90% reduction. In some aspects, the method comprises contacting the cell with three different guide RNAs targeting three different genes.

[0059] In various aspects, the present disclosure provides a programmable CasΦ nuclease or a nucleic acid encoding said programmable CasΦ nuclease, wherein said programmable CasΦ nuclease comprises at least 85% sequence identity to SEQ ID NO: 12. In some aspects, the programmable CasΦ nuclease comprises at least 90% sequence identity to SEQ ID NO: 12. In some aspects, the programmable CasΦ nuclease comprises at least 95% sequence identity to SEQ ID NO: 12. In some aspects, the programmable CasΦ nuclease comprises at least 98% sequence identity to SEQ ID NO: 12. In some aspects, the programmable CasΦ nuclease comprises or consists of an amino acid sequence of SEQ ID NO: 12. In some aspects, the programmable CasΦ nuclease comprises at least 85% sequence identity to SEQ ID NO: 18. In some aspects, the programmable CasΦ nuclease comprises at least 90% sequence identity to SEQ ID NO: 18. In some aspects, the programmable CasΦ nuclease comprises at least 95% sequence identity to SEQ ID NO: 18. In some aspects, the programmable CasΦ nuclease comprises at least 98% sequence identity to SEQ ID NO: 18. In some aspects, the programmable CasΦ nuclease comprises or consists of an amino acid sequence of SEQ ID NO: 18. In some aspects, the programmable CasΦ nuclease comprises at least 85% sequence identity to SEQ ID NO: 32. In some aspects, the programmable CasΦ nuclease comprises at least 85% sequence identity to SEQ ID NO: 32. In some aspects, the programmable CasΦ nuclease comprises at least 90% sequence identity to SEQ ID NO: 32. In some aspects, the programmable CasΦ nuclease comprises at least 95% sequence identity to SEQ ID NO: 32. In some aspects, the programmable CasΦ nuclease comprises at least 98% sequence identity to SEQ ID NO: 32. In some aspects, the programmable CasΦ nuclease comprises or consists of an amino acid sequence of SEQ ID NO: 32. In some aspects, the programmable CasΦ nuclease is capable of binding to a guide RNA comprising a first region that is complementary to a target nucleic acid sequence in a eukaryotic genome and a second region that binds to the programmable CasΦ nuclease. In some aspects, the a complex comprising the programmable CasΦ nuclease and the guide RNA binds to the target sequence. In some aspects, the programmable CasΦ nuclease does not require a tracrRNA to cleave a target nucleic acid. In some aspects, the programmable CasΦ nuclease comprises a RuvC domain, wherein the RuvC domain is capable of processing a pre-crRNA and cleaving a target nucleic acid.

[0060] In various aspects, the present disclosure provides a composition comprising the programmable CasΦ nuclease disclosed herein or a nucleic acid encoding said programmable nuclease, and a guide nucleic acid comprising a first region that is complementary to a target nucleic acid sequence in a eukaryotic genome and a second region that binds to the programmable CasΦ nuclease. In some aspects, the first region comprises a seed region comprising between 10 and 16 nucleosides. In some aspects, the seed region comprises 16 nucleosides. In some aspects, the composition comprises the programmable CasΦ nuclease or a nucleic acid encoding said programmable nuclease and a cell, preferably wherein the cell is a eukaryotic cell. In various aspects, the present disclosure provides a programmable CasΦ nuclease disclosed herein or a nucleic acid encoding said programmable nuclease, and a guide nucleic acid comprising a first region that is complementary to a target nucleic acid sequence in a eukaryotic genome and a second region that binds to the programmable CasΦ nuclease and a cell, preferably wherein the cell is a eukaryotic cell. In some aspects, the first region comprises a seed region comprising between 10 and 16 nucleosides. In some aspects, the seed region comprises 16 nucleosides.

[0061] In various aspects, the present disclosure provides a eukaryotic cell comprising the programmable CasΦ nuclease disclosed herein or a nucleic acid encoding said programmable nuclease. In some aspects, the cell further comprises a guide nucleic acid comprising a first region that is complementary to a target nucleic acid sequence in a eukaryotic genome and a second region that binds to the programmable CasΦ nuclease. In some aspects, the first region comprises a seed region comprising between 10 and 16 nucleosides. In some aspects, the seed region comprises 16 nucleosides.

[0062] In various aspects, the present disclosure provides a vector comprising the nucleic acid encoding a programmable nuclease as disclosed herein. In some aspects, the vector is a viral vector. In some aspects, the vector further comprises a nucleic acid encoding a guide nucleic acid, wherein the guide nucleic acid comprises a first region that is complementary to a target nucleic acid sequence in a eukaryotic genome and a second region that binds to the programmable CasΦ nuclease. In some aspects, the guide nucleic acid is a guide RNA. In some aspects, the vector further comprises a donor polynucleotide. In some aspects, the guide nucleic acid is a guide RNA.

[0063] In various aspects, the present disclosure provides a programmable nuclease or a nucleic acid encoding said programmable nuclease, wherein said programmable nuclease is a Type V CRISPR/Cas enzyme nuclease and comprises between 400 and 900 amino acids, and wherein the programmable nuclease is capable of binding to a guide RNA comprising a first region that is complementary to a target nucleic acid sequence in a eukaryotic genome and a second region that binds to the programmable nuclease; a complex comprising the programmable nuclease and the guide RNA binds to the target sequence; the programmable nuclease comprises a RuvC domain, wherein the RuvC domain is capable of processing a pre-crRNA and cleaving the target nucleic acid; the programmable nuclease cleaves both strands of the target nucleic acid comprising the target sequence, wherein the strand break is a staggered cut with a 5′ overhang; and the programmable nuclease does not require a tracrRNA to cleave the target nucleic acid.

[0064] In various aspects, the present disclosure provides a programmable nuclease or a nucleic acid encoding said programmable nuclease, wherein said programmable nuclease is a Type V CRISPR/Cas enzyme nuclease and comprises between 400 and 900 amino acids, and wherein the programmable nuclease is capable of binding to a guide RNA comprising a first region that is complementary to a target nucleic acid sequence in a eukaryotic genome and a second region that binds to the programmable nuclease; a complex comprising the programmable nuclease and the guide RNA binds to the target sequence; the RuvC-like domain is capable of processing a pre-crRNA and cleaving the target nucleic acid; the programmable nuclease is capable of cleaving the second region of the guide RNA in mammalian cells; and the programmable nuclease does not require a tracrRNA to cleave the target nucleic acid.

[0065] In various aspects, the present disclosure provides a programmable nuclease or a nucleic acid encoding said programmable nuclease, wherein said programmable nuclease is a Type V CRISPR/Cas enzyme nuclease and comprises between 400 and 900 amino acids, and wherein the programmable nuclease is capable of binding to a guide RNA comprising a first region that is complementary to a target nucleic acid sequence in a eukaryotic genome and a second region that binds to the programmable nuclease; a complex comprising the programmable nuclease and the guide RNA binds to the target sequence; the RuvC-like domain is capable of processing a pre-crRNA and cleaving the target nucleic acid; the programmable nuclease cleaves both strands of a target nucleic acid comprising the target sequence, wherein the strand break is a staggered cut with a 5′ overhang; the programmable nuclease is capable of cleaving the second region of the guide RNA in mammalian cells; and the programmable nuclease does not require a tracrRNA to cleave the target nucleic acid.

[0066] In various aspects, the present disclosure provides a programmable nuclease or a nucleic acid encoding said programmable nuclease, wherein said programmable nuclease is a Type V CRISPR/Cas enzyme nuclease and comprises between 400 and 900 amino acids, and wherein the programmable nuclease is capable of binding to a guide RNA comprising a first region that is complementary to a target nucleic acid sequence in a eukaryotic genome and a second region that binds to the programmable nuclease, wherein the first region comprises a seed region comprising between 10 and 16 nucleosides; a complex comprising the programmable nuclease and the guide RNA binds to the target sequence; the RuvC-like domain is capable of processing a pre-crRNA and cleaving the target nucleic acid; and the programmable nuclease does not require a tracrRNA to cleave the target nucleic acid.

[0067] In various aspects, the present disclosure provides a programmable nuclease or a nucleic acid encoding said programmable nuclease, wherein said programmable nuclease is a Type V CRISPR/Cas enzyme nuclease and comprises between 400 and 900 amino acids, and wherein the programmable nuclease is capable of binding to a guide RNA comprising a first region that is complementary to a target nucleic acid sequence in a eukaryotic genome and a second region that binds to the programmable nuclease, wherein the first region comprises a seed region comprising between 10 and 16 nucleosides; a complex comprising the programmable nuclease and the guide RNA binds to the target sequence; the RuvC-like domain is capable of processing a pre-crRNA and cleaving the target nucleic acid; the programmable nuclease cleaves both strands of the target nucleic acid comprising the target sequence, wherein the strand break is a staggered cut with a 5′ overhang; and the programmable nuclease does not require a tracrRNA to cleave the target nucleic acid.

[0068] In various aspects, the present disclosure provides a programmable nuclease or a nucleic acid encoding said programmable nuclease, wherein said programmable nuclease is a Type V CRISPR/Cas enzyme nuclease and comprises between 400 and 900 amino acids, and wherein the programmable nuclease is capable of binding to a guide RNA comprising a first region that is complementary to a target nucleic acid sequence in a eukaryotic genome and a second region that binds to the programmable nuclease, wherein the first region comprises a seed region comprising between 10 and 16 nucleosides; a complex comprising the programmable nuclease and the guide RNA binds to the target sequence; the RuvC-like domain is capable of processing a pre-crRNA and cleaving the target nucleic acid; the programmable nuclease is capable of cleaving the second region of the guide RNA in mammalian cells; and the programmable nuclease does not require a tracrRNA to cleave the target nucleic acid.

[0069] In various aspects, the present disclosure provides a programmable nuclease or a nucleic acid encoding said programmable nuclease, wherein said programmable nuclease is a Type V CRISPR/Cas enzyme nuclease and comprises between 400 and 900 amino acids, and wherein the programmable nuclease is capable of binding to a guide RNA comprising a first region that is complementary to a target nucleic acid sequence in a eukaryotic genome and a second region that binds to the programmable nuclease, wherein the first region comprises a seed region comprising between 10 and 16 nucleosides; a complex comprising the programmable nuclease and the guide RNA binds to the target sequence; the RuvC-like domain is capable of processing a pre-crRNA and cleaving the target nucleic acid; the programmable nuclease cleaves both strands of a target nucleic acid comprising the target sequence, wherein the strand break is a staggered cut with a 5′ overhang; the programmable nuclease is capable of cleaving the second region of the guide RNA in mammalian cells; and the programmable nuclease does not require a tracrRNA to cleave the target nucleic acid. In some aspects, the same active site in the RuvC domain or RuvC-like domain catalyzes the processing of the pre-crRNA and the cleaving of the target nucleic acid. In some aspects, the programmable nuclease is fused or linked to one or more NLS.

[0070] In various aspects, the programmable nuclease disclosed herein or the nucleic acid encoding said programmable nuclease is fused to one or more NLS. In some aspects, the one or more NLS are fused or linked to the N-terminus of the programmable nuclease. In some aspects, the one or more NLS are fused or linked to the C-terminus of the programmable nuclease; or the one or more NLS are fused or linked to the N-terminus and the C-terminus of the programmable nuclease.

[0071] In various aspects, the present disclosure provides a composition comprising a programmable nuclease disclosed herein or a nucleic acid encoding the programmable nuclease; and a gRNA comprising a first region that is complementary to a target nucleic acid sequence in a eukaryotic genome and a second region that binds to the programmable nuclease. In some aspects, the first region comprises a seed region comprising between 10 and 16 nucleosides. In some aspects, the seed region comprises 16 nucleosides. In some aspects, the programmable nuclease or a nucleic acid disclosed herein is comprised in a cell, preferably wherein the cell is a eukaryotic cell. In some aspects, the composition comprising the programmable nuclease or a nucleic acid disclosed herein further comprises a gRNA comprising a first region that is complementary to a target nucleic acid sequence in a eukaryotic genome and a second region that binds to the programmable nuclease and a cell, preferably wherein the cell is a eukaryotic cell. In some aspects, the first region comprises a seed region comprising between 10 and 16 nucleosides. In some aspects, the seed region comprises 16 nucleosides.

[0072] In various aspects, the present disclosure provides a eukaryotic cell comprising a programmable nuclease disclosed herein or a nucleic acid molecule encoding said programmable nuclease. In some aspects, the cell further comprises a gRNA comprising a first region that is complementary to a target nucleic acid sequence in a eukaryotic genome and a second region that binds to the programmable nuclease. In some aspects, the first region comprises a seed region comprising between 10 and 16 nucleosides. In some aspects, the seed region comprises 16 nucleosides. In some aspects, the nucleic acid disclosed herein is comprised in a vector. In some aspects, the vector is a viral vector.

[0073] In some aspects, the present disclosure provides a complex comprising a first programmable CasΦ nuclease and a second programmable CasΦ nuclease. In some aspects, the first programmable CasΦ nuclease and the second programmable CasΦ nuclease are the same programmable CasΦ nuclease. In some aspects, the dimer comprises a first programmable CasΦ nuclease and a second programmable CasΦ nuclease. In some aspects, the composition comprises a first programmable CasΦ nuclease and a second programmable CasΦ nuclease.

[0074] In various aspects, the present disclosure provides a method of modifying a cell comprising a target nucleic acid, comprising introducing a composition comprising a programmable CasΦ nuclease, programmable nuclease or a cas nuclease to a cell, wherein the programmable CasΦ nuclease, programmable nuclease or the cas nuclease cleaves the target nucleic acid, thereby modifying the cell.

[0075] In various aspects, the disclosure provides a method of modifying a cell comprising a target nucleic acid, comprising introducing to the cell (i) the programmable CasΦ nuclease or programmable nuclease disclosed herein and (ii) a guide nucleic acid, wherein the programmable CasΦ nuclease or programmable Cas nuclease cleaves the target nucleic acid, thereby modifying the cell. In some aspects, the guide nucleic acid is a guide RNA. In some aspects, the method further comprises introducing a donor polynucleotide to the cell. In some aspects, the method comprises inserting the donor polynucleotide into the target nucleic acid at the site of cleavage. In some aspects, the cell is a eukaryotic cell, preferably a human cell. In some aspects, the cell is a T cell. In some aspects, the cell is a CAR-T cell. In some aspects, the cell is a stem cell. In some aspects, the cell is a hematopoietic stem cell. In some aspects, the stem cell is a pluripotent stem cell, preferably an induced pluripotent stem cell. In some aspects, the modified cell obtained or obtainable by the method disclosed herein. In some aspect, the disclosure provides a modified human cell obtained or obtainable by the methods herein. In some aspects, the modified cell is a eukaryotic cell, preferably a human cell. In some aspects, the cell is a T cell. In some aspects, the T cell is a CAR-T cell. In some aspects, the cell is a stem cell. In some aspects, the cell is a hematopoietic stem cell. In some aspects, the cell is a pluripotent stem cell, preferably an induced pluripotent stem cell.

[0076] In some aspects, the method comprises the use of a CasΦ nuclease to introduce a first modification in a first gene and a second modification in a gene according to the methods disclosed herein. In some aspects, the method comprises the use of a programmable CasΦ nuclease, programmable nuclease or a cas nuclease to modify a cell according to the methods disclosed herein. In some aspects, the method comprises lipid nanoparticle delivery of a nucleic acid encoding the programmable CasΦ nuclease, programmable nuclease or cas nuclease, and the guide nucleic acid. In some aspects, the nucleic acid further comprises a donor polynucleotide. In some aspects, the nucleic acid is a viral vector. In some aspects, the viral vector is an AAV vector.

### INCORPORATION BY REFERENCE

[0077] All publications, patents, and patent applications mentioned in this specification are herein incorporated by reference to the same extent as if each individual publication, patent, or patent application was specifically and individually indicated to be incorporated by reference.

### BRIEF DESCRIPTION OF THE DRAWINGS

[0078] The novel features of the invention are set forth with particularity in the appended claims. A better understanding of the features and advantages of the present invention will be obtained by reference to the following detailed description that sets forth illustrative embodiments, in which the principles of the invention are utilized, and the accompanying drawings of which:

[0079] FIG. 1 illustrates results of a cis-cleavage assay on CasΦ polypeptides to assess programmable nickase activity. The results showed that CasΦ orthologs comprise programmable nickase activity. The assay was performed on five CasΦ polypeptides, designated CasΦ.2, CasΦ.11, CasΦ.17, CasΦ.18, and CasΦ.12, in FIG. 1. For the assay, each of the CasΦ polypeptides was complexed with a guide nucleic acid at room temperature for 20 minutes to form a ribonucleoprotein (RNP) complex. The RNP complexes for each of the CasΦ polypeptides were separately incubated at 37° C. for 60 minutes with plasmid DNA targeted by the guide nucleic acids. The graph shows the percentage of plasmids that developed nicks (single-stranded breaks) or linearized (double-stranded breaks) during the 60 minute incubation, as measured by gel-electrophoresis. The data showed that CasΦ.2, CasΦ.11, CasΦ.17, and CasΦ.18 acted as programmable nickases. CasΦ.17 and CasΦ.18 produced only nicked product. CasΦ.2 and CasΦ.11 generated some linearized product but primarily nicked intermediate. CasΦ.12 generated almost entirely linearized product.

[0080] FIG. 2A and FIG. 2B illustrate results of a cis-cleavage assay on CasΦ polypeptides to assess the effect of crRNA repeat sequence and RNP complexing temperature on the programmable nickase activity of CasΦ polypeptides. Each of three proteins (designated CasΦ.11, CasΦ.17 and CasΦ.18 in FIG. 2A and FIG. 2B) was tested for its ability to nick plasmid DNA when complexed with one of four crRNAs comprising the repeat sequences of CasΦ.2, CasΦ.7, CasΦ.10 and CasΦ.18 (abbreviated j2, j7, j10, and j18, respectively, in FIG. 2A and FIG. 2B). FIG. 2C illustrates the alignment of CasΦ.2, CasΦ.7, CasΦ.10, and CasΦ.18 repeat sequences showing conserved (highlighted in black) and diverged nucleotides. For the assay, the RNP complex formation of each of the CasΦ polypeptides with the guide nucleic acid was performed at either room temperature or at 37° C. The incubation of the RNP complex with the input plasmid DNA that comprised the target sequence for the guide nucleic acids was carried out for 60 minutes at 37° C. FIG. 2A shows the percentage of input plasmid DNA that was nicked by RNP complexes assembled at room temperature. The data showed that crRNAs comprising repeat sequences from all tested CasΦ polypeptides supported nickase activity by CasΦ.11, CasΦ.17, and CasΦ.18; the only exception was the CasΦ.17/CasΦ.2-repeat pairing. FIG. 2B shows the percentage of input plasmid DNA that was nicked by RNP complexes assembled at 37° C. The data showed that the activity of each protein is completely abolished when complexed with crRNAs comprising a repeat sequence from CasΦ.2 or CasΦ.10. FIG. 2D shows corresponding data for CasΦ.2, CasΦ.4, CasΦ.6, CasΦ.9, CasΦ.10, CasΦ.12 and CasΦ.13 for the experiment shown in FIG. 2A and FIG. 2B. FIG. 2D also shows the percentage of input plasmid DNA that was linearized by CasΦ.2, CasΦ.4, CasΦ.6, CasΦ.9, CasΦ.10, CasΦ.11, CasΦ.12, CasΦ.13, CasΦ.17 and CasΦ.18 when complexed with one of four crRNAs J2, j7, j10 and j18, as described above. Sequences corresponding to SEQ ID NOS: 2491-2494, 50, 52, 51, and 49 are depicted in FIG. 2C.

[0081] FIG. 3A illustrates the cleavage pattern for the control that comprised no CasΦ polypeptide. In the absence of CasΦ polypeptide, the target DNA remained uncut and resulted in complete sequencing of both target and non-target strands. FIGS. 3B-3E illustrate results of a cis-cleavage assay and sequencing run demonstrating that CasΦ nickases cleave the non-target strand of a double-stranded DNA target. A cis-cleavage assay was performed with four CasΦ polypeptides, CasΦ.12, CasΦ.2, CasΦ.11, and CasΦ.18, and a control comprising no CasΦ polypeptide, on a super-coiled plasmid DNA comprising a protospacer immediately downstream of a TTTN PAM sequence. The resulting DNA from the assay was Sanger sequenced using forward and reverse primers. The forward primer comprised the sequence of the target strand (TS) of the DNA sequence, while the reverse primer comprised the sequence of the non-target strand (NTS). If a strand had been cleaved by the CasΦ polypeptide being assayed, the sequencing signal would drop off from the cleavage site. FIG. 3B illustrates the cleavage pattern for CasΦ.12 protein, which comprises double-stranded DNA cleavage activity. As shown in the figure, the sequencing signal dropped off on both the target and the non-target strands (as shown by arrows) demonstrating cleavage of both strands. FIG. 3C illustrates the cleavage pattern for CasΦ.2, which predominantly nicks DNA as illustrated in FIG. 1. The sequencing signal dropped off only on the non-target strand (bottom arrow) demonstrating nicking of the non-target strand. FIG. 3D illustrates the cleavage pattern for CasΦ.11. As illustrated in FIG. 1, CasΦ.11 only nicks DNA after 60 minutes of incubation with plasmid DNA. The sequencing signal dropped off on the non-target strand (bottom arrow), thus demonstrating that CasΦ.11 nicks the non-target strand. FIG. 3E illustrates the cleavage pattern for CasΦ.18. As illustrated in FIG. 1, CasΦ.18 only nicks DNA after 60 minutes of incubation with plasmid DNA. The sequencing signal dropped off on the non-target strand (bottom arrow), thus demonstrating that CasΦ.18 nicks the non-target strand. Sequences corresponding to SEQ ID NOS: 2495-2496 are depicted in FIG. 3A. Sequences corresponding to SEQ ID NOS: 2497-2498 are depicted in FIG. 3B.

[0082] FIGS. 4A-4B illustrate results of a cis-cleavage assay on CasΦ polypeptides to assess the effect of crRNA repeat and target sequence the programmable nickase and double strand DNA cleavage activity of CasΦ polypeptides. The heat map in FIG. 4A cleavage products for 60 minute in vitro plasmid cleavage reactions of 12 CasΦ orthologs paired with 10 crRNA repeat sequences. Except for 0, all Repeat and CasΦ axis labels refer Cas12Φ system numbers. Repeat 0 is a negative control including the CasΦ.18 crRNA repeat sequence and a non-targeting spacer sequence. With rare exceptions, preference for nicking or linearizing target DNA is not affected by crRNA repeat or target DNA sequence. Raw data for CasΦ.12 and CasΦ.18 targeting spacer 1 (boxes) are shown in FIG. 4B. FIG. 4B shows the raw gel data used to generate a subset of the heat map from FIG. 4A. CasΦ.12 predominantly linearizes plasmid DNA (i.e. cleaves both strands of a double strand DNA target) whereas CasΦ.18 primarily does not proceed beyond the first strand nicking.

[0083] FIGS. 5A-5D illustrates the structural conservation of CasΦ crRNA repeats. FIG. 5A and FIG. 5B show the structure of the crRNA repeats for CasΦ.1, CasΦ.2, CasΦ.7, CasΦ.11, CasΦ.12, CasΦ.13, CasΦ.18, and CasΦ.32. These structures were calculated using an online RNA prediction tool (rna.urmc.rochester.edu/RNAstructureWeb/Servers/Predict1/Predict1.html) using default parameters at 37° C. The sequences of these repeats are provided in TABLE 2. FIG. 5C shows the consensus structure of the crRNA as determined by the LocaRNA tool using the crRNA repeats from CasΦ.1, CasΦ.2, CasΦ.4, CasΦ.7, CasΦ.10, CasΦ.11, CasΦ.12, CasΦ.13, Cas12Φ.17, CasΦ.18, CasΦ.19, CasΦ.21, CasΦ.22, CasΦ.23, CasΦ.24, CasΦ.25, CasΦ.26, CasΦ.27, CasΦ.28, CasΦ.29, CasΦ.30, CasΦ.31, CasΦ.32, CasΦ.33, CasΦ.35 and CasΦ.41. FIG. 5D shows a further refined consensus structure of the crRNA determined by the LocaRNA tool. The LocaRNA tool aligns RNA sequences while considering consensus secondary structure of the RNA sequence. Sequences corresponding to SEQ ID NOS: 51, 53-55, 50, and 2503 are depicted in FIG. 5B. The sequence corresponding to SEQ ID NO: 2504 is depicted in FIG. 5C. The sequence corresponding to SEQ ID NO: 2505 is depicted in FIG. 5D.

[0084] FIGS. 6A-6D illustrates the optimal PAM preferences for CasΦ.2, CasΦ.4, CasΦ.11, CasΦ.12 and CasΦ.18. An in vitro cleavage assay was performed using a linear DNA target. Starting with a TTTA PAM, each position was varied one by one to the other 3 nucleotides for a total of 12 variants in addition to parental TTTA. FIG. 6A shows a heat map which illustrates the absolute levels of double strand cleavage (or nicking for CasΦ.18). FIG. 6B and FIG. 6C shows the data from FIG. 6A after normalization to the parental TTTA PAM as 100%. FIG. 6D shows the optimal PAM preferences of these CasΦ polypeptides with a summary of the data shown in FIG. 6A, FIG. 6B and FIG. 6D.

[0085] FIG. 7 illustrates that CasΦ polypeptides rapidly nick supercoiled DNA. CasΦ polypeptides where assembled with their native repeat crRNAs targeting one of two targets (S1, TATTAAATACTCGTATTGCTGTTCGATTAT (SEQ ID NO: 108), or S2, CACAGCTTGTCTGTAAGCGGATGCCATATG (SEQ ID NO: 109)) immediately downstream of a GTTG or TTTG PAM. Reactions were initiated with the addition of supercoiled target DNA and stopped after 1, 3, 6, 15, 30 and 60 mins. The cleavage was quantified by agarose gel analysis as nicked (left column) or linear (right column). Error bars are +/−SEM of duplicate time courses.

[0086] FIGS. 8A-8B illustrate that CasΦ polypeptides prefer full-length repeats and spacers from 16 to 20 nucleotides. crRNA panels varying in repeat and spacer length were tested for their ability to support CasΦ polypeptides spacer cleavage. Two different CasΦ repeats that function across CasΦ orthologs were utilized. FIG. 8A shows results of the assay for nicking (top) or linearization (bottom) as influenced by the length of the crRNA repeat. 19 nucleotides was the shortest repeat still supporting cleaving activity. FIG. 8B shows results for nicking (top) or linearization (bottom) as influenced by the length of the crRNA spacer. The optimal spacer length varied by target but is generally 16 to 20 nucleotides.

[0087] FIGS. 9A-9B illustrate CasΦ.12 cleavage in HEK293T cells and the effect of changing the spacer length on this cleavage. FIG. 9A provides a schematic of how CasΦ.12 cleavage activity was assessed in HEK293T cells. An Ac-GFP-expressing HEK293T cell line was transfected with a plasmid expressing CasΦ.12 and its crRNA targeting the Ac-GFP gene. CasΦ.12 cleavage was assessed by the reduction in Ac-GFP-expressing cells as assessed by flow cytometry. As shown in FIG. 9B, varying the spacer length varied the degree of CasΦ.12 cleavage. CasΦ.12 has a preference for a spacer length of 17 to 22 nucleotides in HEK293T cells, but longer spacers (up to 30 nucleotides was tested) also supported CasΦ.12 cleavage.

[0088] FIGS. 10A-10B illustrate that the CasΦ disclosed herein are a novel family of Cas nucleases. As shown in FIG. 10A, the InterPro database did not recognize CasΦ.2 as a protein family member. As a positive control, the InterPro database identified Acidaminococcus sp. (strain BV3L6) as a Cas12a protein family member, as shown in FIG. 10B.

[0089] FIG. 11A, FIG. 11B, FIG. 11C, FIG. 11D, FIG. 11E, FIG. 11F, FIG. 11G, and FIG. 11H, illustrates the raw HMM for PF07282.

[0090] FIG. 12A, FIG. 12B, FIG. 12C, FIG. 12D, FIG. 12E, FIG. 12F, FIG. 12G, FIG. 12H, FIG. 12I, FIG. 12J, FIG. 12K, FIG. 12L, FIG. 12M, FIG. 12N, FIG. 12O, FIG. 12P, FIG. 12Q, FIG. 12R, FIG. 12S, FIG. 12T, FIG. 12U, FIG. 12V, FIG. 12W, and FIG. 12X, illustrates the raw HMM for PF18516.

[0091] FIGS. 13A-13C illustrate the cleavage activity of CasΦ.19-CasΦ.48.

[0092] FIGS. 14A-14C illustrate the PAM requirement of CasΦ polypeptides. FIG. 14A shows the PAM requirement of CasΦ.2, CasΦ.4, CasΦ.11 and CasΦ.12. FIG. 14B shows the PAM requirement of CasΦ.20, CasΦ.26, CasΦ.32, CasΦ.38 and CasΦ.45. FIG. 14C shows the cleavage products from the assessment of the PAM requirement for CasΦ.20, CasΦ.24 and CasΦ.25. FIG. 14D shows the quantification of the raw data shown in FIG. 14C.

[0093] FIG. 15 illustrates endogenous gene editing in HEK293T cells. Sequences corresponding to SEQ ID NOS: 2506-2515 are depicted in FIG. 15.

[0094] FIGS. 16A-16L illustrate endogenous gene editing in CHO cells. FIG. 16A shows CasΦ.12 mediated generation of insertion or deletion mutations (indel) in the endogenous Bak1, Bax and Fut8 genes. FIG. 16B shows the DNA donor oligos used to assess CasΦ.12 mediated gene editing via the homology directed repair pathway. FIG. 16C shows the detection of indels following delivery of CasΦ.12. FIG. 16D shows the sequence analysis for the data in FIG. 16C. FIG. 16E shows the detection of incorporated donor template following delivery of CasΦ.12 and a donor oligo. Further examples of CasΦ.12 mediated generation of indel mutations are shown in FIG. 16F, FIG. 16G and FIG. 16H for Bak1, Bax and Fut8 genes, respectively. FIG. 16I shows the DNA donor oligos used to assess CasΦ.12 mediated gene editing via the homology directed repair pathway. FIG. 16J shows the frequency of HDR in CHO cells following delivery of either Cas9 and a gRNA targeting Bax, CasΦ.12 and a gRNA targeting Bax or CasΦ.12 and a gRNA targeting Fut8. FIG. 16K and FIG. 16L show the frequency of indel mutations and HDR, respectively, detected in CHO cells following delivery of CasΦ.12 and AAV6 DNA donors at the indicated number of viral genomes per cell (1×10\hat{ }5, 3×10\hat{ }5, or 1×10\hat{ }6). Sequences corresponding to SEQ ID NOS: 2516-2525 are depicted in FIG. 16D.

[0095] FIG. 17 illustrates endogenous gene editing in K562 cells.

[0096] FIGS. 18A-18E illustrate endogenous gene editing in primary cells. FIG. 18A shows a flow cytometry analysis of T cells that have received CasΦ.12 with or without a gRNA targeting the beta-2 microglobulin gene. FIG. 18B shows the modification detected in K562 cells and T cells following delivery of CasΦ.12 and a gRNA targeting the beta-2 microglobulin gene. FIG. 18C shows the sequence analysis of the T cell population which received CasΦ.12 and the gRNA targeting the beta-2 microglobulin gene. FIG. 18D shows a flow cytometry analysis of T cells that have received CasΦ.12 with a gRNA targeting the T Cell Receptor Alpha Constant gene. FIG. 18E shows the sequence analysis of cell populations that received CasΦ.12 with a gRNA targeting the T Cell Receptor Alpha Constant gene. FIG. 18F shows the quantification of indels detected by sequence analysis. Sequences corresponding to SEQ ID NOS: 2526-2528 are depicted in FIG. 18C. Sequences corresponding to SEQ ID NOS: 2529-2559 are depicted in FIG. 18E.

[0097] FIG. 19 illustrates the cleavage of the second DNA strand by CasΦ nucleases in a separable reaction step to the cleavage of the first DNA strand.

[0098] FIG. 20 illustrates the trans cleavage of ssDNA by CasΦ nucleases in a detection assay.

[0099] FIGS. 21A-21B illustrate the CasΦ.12-mediated efficiency is comparable to that of Cas9. FIG. 21A shows the frequency of indel mutations and quantification of B2M knockout cells from flow cytometry panels in FIG. 21B.

[0100] FIGS. 22A-22B illustrate the identification of optimized gRNAs for genome editing with CasΦ.12 in CHO cells. FIG. 22A shows the frequency of indel mutations induced by CasΦ.12 polypeptides complexed with a 2′fluoro modified gRNA. FIG. 22B shows further CasΦ.12 RNP complexes that can mediate genome editing in CHO cells.

[0101] FIGS. 23A-23H illustrate minimal off-target CasΦ.12-mediated genome editing in CHO and HEK293 cells. FIGS. 23A-23F are off-target analysis InDel validation from a list of potential off-target sites based on in-silico computational predictions. FIG. 23A shows CasΦ.12 targeting Fut8, FIG. 23B shows CasΦ.12 targeting BAX, FIG. 23C shows Cas9 targeting BAX, FIG. 23D shows Cas9 targeting Fut8, FIG. 23E shows Cas9 targeting Bak1 and FIG. 23F shows CasΦ.12 targeting Bak1. FIG. 23G shows off-target analysis using unbiased guide-seq procedure, using CasΦ.12 and guides targeting human Fut8 in HEK293 cells. FIG. 23H shows off-target analysis using unbiased guide-seq procedure, using Cas9 and guides targeting human Fut8 in HEK293 cells. Sequences corresponding to SEQ ID NOS: 2592-2623 are depicted in FIG. 23A. Sequences corresponding to SEQ ID NOS: 2624-2656 are depicted in FIG. 23B. Sequences corresponding to SEQ ID NOS: 2657-2687 are depicted in FIG. 23C. Sequences corresponding to SEQ ID NOS: 2560-2591 are depicted in FIG. 23D. Sequences corresponding to SEQ ID NOS: 2688-2719 are depicted in FIG. 23E. Sequences corresponding to SEQ ID NOS: 2720-2752 are depicted in FIG. 23F. The sequence corresponding to SEQ ID NO: 2753 is depicted in FIG. 23G. Sequences corresponding to SEQ ID NOS: 2753-2758 are depicted in FIG. 23H.

[0102] FIGS. 24A-24B illustrate CasΦ.12-mediated genome editing via homology directed repair (HDR). FIG. 24A shows CasΦ.12-mediated gene editing via the HDR pathway. FIG. 24B shows a schematic of the donor oligonucleotide.

[0103] FIGS. 25A-25E illustrate the ability of CasΦ.12 to target multiple genes. FIG. 25A shows the percentage of B2M and TRAC knockout after CasΦ.12-mediated genome editing with gRNAs with a repeat length of 20 nucleotides and a spacer length of 20 nucleotides. FIG. 25B shows the percentage of B2M and TRAC knockout after CasΦ.12-mediated genome editing with gRNAs with a repeat length of 20 nucleotides and a spacer length of 17 nucleotides. FIG. 25C and FIG. 25D shows corresponding flow cytometry panels for B2M and TRAC knockout with different gRNAs. FIG. 25E shows the percentage of TRAC knockout after CasΦ.12-mediated genome editing with modified gRNAs of different spacer lengths (repeat length of 20 nucleotides and a spacer length of 17 or 20 nucleotides). FIG. 25F shows a corresponding flow cytometry panel for TRAC knockout after CasΦ.12-mediated genome editing.

[0104] FIGS. 26A-26D illustrate the extended seed region of CasΦ.12. FIG. 26A and FIG. 26B show no indel mutations or CD3 knockout occurs when there is a single or double mismatch in the first 1-16 nucleotides from the 5′ end of the spacer. FIG. 26C and FIG. 26D provide schematics of the gRNAs with mismatches. Sequences corresponding to SEQ ID NOS: 2759-2761 are depicted in FIG. 26C. Sequences corresponding to SEQ ID NOS: 2759-2760, and 2762 are depicted in FIG. 26D.

[0105] FIGS. 27A-27B illustrate the ability of CasΦ.12 to mediate genome editing in CHO cells with modified gRNAs.

[0106] FIGS. 28A-28B illustrate the ability of CasΦ.12 to mediate genome editing with gRNAs with variations in repeat and spacer length. FIG. 28A shows the frequency of CasΦ.12-mediated indel mutations using gRNA of different repeat lengths. FIG. 28B shows the frequency of CasΦ.12-mediated indel mutations using gRNA of different spacer lengths.

[0107] FIGS. 29A-29E illustrate exemplary gRNAs for targeting CD3, B2M and PD1 with CasΦ.12 in human primary T cells. FIG. 29F shows the screening of gRNAs targeting TRAC. FIG. 29H shows the screening of gRNAs targeting B2M. FIG. 29G and FIG. 29I show flow cytometry panels of exemplary gRNAs targeting TRAC and B2M, respectively.

[0108] FIGS. 30A-30K illustrate delivery of CasΦ.12 RNPs or CasΦ.12 mRNA both lead to efficient genome editing. FIG. 30A and FIG. 30B show flow cytometry panels of CasΦ.12 RNP complexes targeting B2M and TRAC in T cells, and are quantified in FIG. 30C and FIG. 30D. FIG. 30E and FIG. 30F show the quantification of indels detected by sequence analysis with delivery of CasΦ.12 RNPs. FIG. 30G and FIG. 30I show the frequency of indel mutations after delivery of CasΦ.12 mRNA and the quantification of B2M knockout cells shown in FIG. 30H is an exemplary FACS panel for two data points in FIG. 30G. FIG. 30J and FIG. 30K show the distribution of the size of indel mutations induced by CasΦ.12 or Cas9. Sequences corresponding to SEQ ID NOS: 2526-2527 and 2763-2765 are depicted in FIG. 30J. Sequences corresponding to SEQ ID NOS: 2766-2771 are depicted in FIG. 30K.

[0109] FIGS. 31A-31B illustrate CasΦ.12 can process its own guide RNA in mammalian cells. Sequences corresponding to SEQ ID NOS: 2772, 2811, 2773-2798, 2733 and 2805 are depicted in FIG. 31A. Sequences corresponding to SEQ ID NOS: 2799-2811 are depicted in FIG. 31B.

[0110] FIGS. 32A-32E illustrate CasΦ polypeptide-induced cleavage patterns. FIG. 32A, shows CasΦ polypeptides generated nicked and linearized plasmid DNA. FIG. 32B shows a schematic of the cut sites on the target and non-target strand. FIG. 32C shows sequence analysis of the non-target stand target strand and is represented in FIG. 32D. FIG. 32E shows a table of cut sites and overhangs of the different CasΦ polypeptides. Sequences corresponding to SEQ ID NOS: 2812-2825 are depicted in FIG. 32C. Sequences corresponding to SEQ ID NOS: 2816, 2823, 2826-2828 are depicted in FIG. 32D.

[0111] FIG. 33 illustrates the ability of CasΦ RNP complexes to knockout multiple genes simultaneously. T cells were nucleofected with RNP complexes of CasΦ.12 and gRNAs targeting B2M, TRAC or PDCD1 and the percentage knockout was measured using flow cytometry.

[0112] FIG. 34 illustrates the ability of CasΦ.12 RNP complexes to mediate high efficiency genome editing of PCKS9 in mouse Hepa1-6 cells. 95 CasΦ gRNAs were used along with Cas9, as a control. CasΦ.12 RNP complexes induced a maximum indel frequency of 48%, whereas Cas9 RNP complexed induced a maximum indel frequency of 22%.

[0113] FIGS. 35A-35F illustrate the ability of a CasΦ.12 all-in-one vector to mediate genome editing in Hepa1-6 mouse hepatoma cells. FIG. 35A shows a plasmid map of the AAV encoding the CasΦ polypeptide sequence and gRNA sequence. FIG. 35B illustrates repeat truncations. FIG. 35C shows efficient transfection with AAV. FIG. 35D shows the frequency of CasΦ.12 induced indel mutations. FIG. 35E and FIG. 35.F show the frequency of CasΦ.12 induced indel mutations with different gRNA containing repeat and spacer sequences of different lengths. Sequences corresponding to SEQ ID NOS: 2816, 2829-2834 are depicted in FIG. 35B.

[0114] FIG. 36 illustrates the optimization of LNP delivery of mRNA encoding CasΦ and gRNA. A range of N/P ratios were tested and the frequency of indel mutations was determined.

[0115] FIG. 37 illustrates CasΦ-mediated genome editing of CD34 hematopoietic stem cells. Cells were nucleofected with either RNP complexes containing CasΦ.12 polypeptides and a B2M-targeting guide, or a mixture of CasΦ.12 mRNA and B2M-targeting guide and the frequency of indel mutations was determined.

[0116] FIG. 38 illustrates CasΦ-mediated genome editing of induced pluripotent stem cells. Cells were nucleofected with RNP complexes (CasΦ.12 polypeptides and gRNAs targeting either the B2M locus or targeting a CIITA locus) and the frequency of indel mutations was determined.

[0117] FIG. 39 illustrates CasΦ-mediated genome editing of the CIITA locus in K562 cells. Cells were nucleofected with RNP complexes (CasΦ polypeptides and gRNAs targeting CIITA) and the frequency of indel mutations was determined by NGS.

### DETAILED DESCRIPTION

[0118] The present disclosure provides methods, compositions, systems, and kits comprising programmable CasΦ nucleases. An illustrative composition comprises a programmable CasΦ nuclease or a nucleic acid encoding the programmable CasΦ nuclease, wherein the programmable CasΦ nuclease comprises at least 85% sequence identity to a sequence selected from the group consisting of SEQ ID NOs: 1 to 47 and SEQ ID NO. 105. In some embodiments, the composition further comprises a guide nucleic acid or a nucleic acid encoding the guide nucleic acid, wherein the guide nucleic acid comprises a region comprising a nucleotide sequence that is complementary to a target nucleic acid sequence and an additional region, wherein the region and the additional region are heterologous to each other. As used herein, the term “heterologous” may be used to describe or indicate that a first sequence is different from a second sequence and do not naturally occur together. As used herein, the term “heterologous” may be used to describe that a first moiety (e.g., a first sequence) is different from a second moiety (e.g., a second sequence) and, as such, the two moieties do not naturally occur together and are engineered to be a part of one entity. For example, a guide nucleic acid sequence comprising a region and an additional region that are heterologous to each other may indicate that the guide nucleic acid sequence is engineered to include the region and the additional region. The programmable CasΦ nuclease and the guide nucleic acid may be complexed together in a ribonucleoprotein complex. Alternatively, compositions consistent with the present disclosure include nucleic acids encoding for the programmable CasΦ nuclease and the guide nucleic acid. In some embodiments, the guide nucleic acid comprises a sequence with at least about 85% sequence identity to a sequence selected from the group consisting of SEQ ID NOs: 48 to 86. In some embodiments, the programmable CasΦ nuclease is SEQ ID NO: 12 or SEQ ID NO: 105. In some embodiments, the programmable CasΦ nuclease comprises nickase activity. In some embodiments, the programmable CasΦ nuclease comprises double-strand cleavage activity. As used herein, CasΦ may be referred to as Cas12j or Cas14u.

[0119] Also disclosed herein are compositions, methods, and systems for modifying a target nucleic acid sequence. An illustrative method for modifying a target nucleic acid sequence comprises contacting a target nucleic acid sequence with a programmable CasΦ nuclease comprising at least 85% sequence identity to a sequence selected from the group consisting of SEQ ID NOs: 1 to 47 and SEQ ID NO. 105, and a guide nucleic acid, wherein the programmable CasΦ nuclease cleaves the target nucleic acid sequence, thereby modifying the target nucleic acid sequence. In some embodiments, the programmable CasΦ nuclease introduces a double-stranded break in the target nucleic acid. In some embodiments, the programmable CasΦ nuclease introduces a single-stranded break.

[0120] Also disclosed herein are compositions, methods, and systems for modifying a target nucleic acid sequence comprising use of two or more programmable CasΦ nickases. An illustrative method for introducing a break in a target nucleic acid comprises contacting the target nucleic acid with: (a) a first guide nucleic acid comprising a region that binds to a first programmable nickase comprising at least 85% sequence identity to a sequence selected from the group consisting of SEQ ID NOs: 1 to 47 and SEQ ID NO. 105; and (b) a second guide nucleic acid comprising a region that binds to a second programmable nickase comprising at least 85% sequence identity to a sequence selected from the group consisting of SEQ ID NOs: 1 to 47 and SEQ ID NO. 105, wherein the first guide nucleic acid comprises an additional region that binds to the target nucleic acid and wherein the second guide nucleic acid comprises an additional region that binds to the target nucleic acid and wherein the additional region of the first guide nucleic acid and the additional region of the second guide nucleic acid bind opposing strands of the target nucleic acid.

[0121] Also disclosed herein are compositions, methods, and systems for detecting a target nucleic acid in a sample. An illustrative method for detecting a target nucleic acid in a sample comprises contacting the sample comprising the target nucleic acid with (a) a programmable CasΦ nuclease comprising at least 85% sequence identity to a sequence selected from the group consisting of SEQ ID NOs: 1 to 47 and SEQ ID NO. 105; (b) a guide RNA comprising a region that binds to the programmable CasΦ nuclease and an additional region that binds to the target nucleic acid; and (c) a labeled, single stranded DNA reporter that does not bind the guide RNA; cleaving the labeled single stranded DNA reporter by the programmable CasΦ nuclease to release a detectable label; and detecting the target nucleic acid by measuring a signal from the detectable label.

[0122] Also disclosed herein are compositions, methods, and systems for modulating transcription of a gene in a cell. An illustrative method of modulating transcription of a gene in a cell comprises introducing into a cell comprising a target nucleic acid sequence: (i) a fusion polypeptide or a nucleic acid encoding the fusion polypeptide, wherein the fusion polypeptide comprises: (a) a dCasΦ polypeptide comprising at least 85% sequence identity to a sequence selected from the group consisting of SEQ ID NOs: 1 to 47 and SEQ ID NO. 105, wherein the dCasΦ polypeptide is enzymatically inactive; and (b) a polypeptide comprising transcriptional regulation activity; and (ii) a guide nucleic acid, or a nucleic acid comprising a nucleotide sequence encoding the guide nucleic acid, wherein the guide nucleic acid comprises a region that binds to the dCasΦ polypeptide and an additional region that binds to the target nucleic acid; wherein transcription of the gene is modulated through the fusion polypeptide acting on the target nucleic acid sequence.

[0123] Also disclosed is use of a programmable CasΦ nuclease to modify a target nucleic acid sequence according to any of the methods described herein. Also disclosed is use of a first programmable nickase and a second programmable nickase to introduce a break in a target nucleic acid according to any of the methods described herein. Also disclosed is use of a programmable CasΦ nuclease to detect a target nucleic acid in a sample according to any of the methods described herein. Also disclosed is use of a dCasΦ polypeptide to modulate transcription of a gene in a cell according to any of the methods described herein.

### Programmable Nucleases

[0124] The present disclosure provides methods and compositions comprising programmable nucleases. The programmable nucleases can be complexed with a guide nucleic acid of the disclosure for targeting a target nucleic acid for detection, editing, modification, or regulation of the target nucleic acid.

[0125] The programmable nuclease can be used for detecting a target nucleic acid. For example, in certain embodiments, when the programmable nuclease is complexed with the guide nucleic acid and the target nucleic acid hybridizes to the guide nucleic acid, trans-cleavage of a single stranded DNA (ssDNA), such as an ssDNA reporter, by the programmable nuclease is activated. Detection of trans-cleavage of ssDNA can be used to determine a target nucleic acid in a sample.

[0126] The programmable nuclease can be used for editing or modifying a target nucleic acid, for example, by site-specific cleavage of a target sequence, donor nucleic acid insertion, or a combination thereof.

[0127] The programmable nuclease can be used for gene regulation of a target nucleic acid, for example, using a catalytically inactive programmable nuclease in combination with a polypeptide comprising gene regulation activity.

[0128] In some embodiments, the programmable nuclease is a programmable nuclease comprising site-specific nucleic acid cleavage activity. In some embodiments, the programmable nuclease is a programmable nuclease comprising double-strand DNA cleavage activity. In some embodiments, the programmable nuclease is a programmable nickase. In some embodiments, the programmable nuclease is a programmable DNA nickase. In some embodiments, the programmable nuclease is a programmable nuclease comprising a catalytically inactive nuclease domain. In some embodiments, the programmable nuclease comprising a catalytically inactive nuclease domain can include at least 1, at least 2, at least 3, at least 4, or at least 5 mutations relative to a wild type nuclease domain. Said mutations may be present within the cleaving or active site of the nuclease.

[0129] In some embodiments, the programmable nuclease is a programmable DNA nuclease. In some embodiments, the programmable nuclease is a Type V CRISPR/Cas enzyme, wherein a Type V CRISPR/Cas enzyme comprises a single active site or catalytic domain in a single RuvC domain. The RuvC domain is typically near the C-terminus of the enzyme. A single RuvC domain may comprise RuvC subdomains, for example RuvCI, RuvCII and RuvCIII. As used herein a “Type V CRISPR/Cas enzyme” or “Type V cas nuclease” or “Type V cas effector” may be used to describe a family of enzymes or a member thereof having diverse N-terminal structures and often comprising a conserved single catalytic RuvC-like endonuclease domain that is C-terminal of the N-terminal structures, derived from the TnpB protein encoded by autonomous or non-autonomous transposons. The terms “RuvC domain” and “RuvC-like domain” are used interchangeably for Type V CRISPR/Cas enzymes, Type V cas nucleases and Type V cas effectors. In some embodiments, the Type V CRISPR/Cas enzyme is a CasΦ nuclease. A CasΦ polypeptide can function as an endonuclease that catalyzes cleavage at a specific sequence in a target nucleic acid. A programmable CasΦ nuclease of the present disclosure may have a single active site in a RuvC domain that is capable of catalyzing pre-crRNA processing and nicking or cleaving of nucleic acids. This compact catalytic site may render the programmable CasΦ nuclease especially advantageous for genome engineering and new functionalities for genome manipulation.

[0130] In some embodiments, the RuvC domain is a RuvC-like domain. Various RuvC-like domains are known in the art and are easily identified using online tools such as InterPro (www.ebi.ac.uk/interpro/). For example, a RuvC-like domain may be a domain which shares homology with a region of TnpB proteins of the IS605 and other related families of transposons, as described in review articles such as Shmakov et al. (Nature Reviews Microbiology volume 15, pages 169-182 (2017)) and Koonin E. V. and Makarova K. S. (2019, Phil. Trans. R. Soc., B 374:20180087). In some embodiments, the RuvC-like domain shares homology with the transposase IS605, OrfB, C-terminal. A transposase IS605, OrfB, C-terminal is easily identified by the skilled person using bioinformatics tools, such as PFAM (Finn et al. (Nucleic Acids Res. 2014 Jan. 1; 42 (Database issue): D222-D230); El-Gebali et al. (2019) Nucleic Acids Res. doi:10.1093/nar/gky995). PFAM is a database of protein families in which each entry is composed of a seed alignment which forms the basis to build a profile hidden Markov model (HMM) using the HMMER software (hmmer.org). It is readily accessible via pfam.xfam.org, maintained by EMBL-EBI, which easily allows an amino acid sequence to be analyzed against the current release of PFAM (e.g. version 33.1 from May 2020), but local builds can also be implemented using publicly- and freely-available database files and tools. A transposase IS605, OrfB, C-terminal is easily identified by the skilled person using the HMM PF07282. PF07282 is reproduced for reference in FIG. 11 (accession number PF07282.12). The skilled person would also be able to identify a RuvC domain, for example with the HMM PF18516, using the PFAM tool. PF18516 is reproduced for reference in FIG. 12 (accession number PF18516.2). In some embodiments, the programmable CasΦ nuclease comprises a RuvC-like domain which matches PFAM family PF07282 but does not match PFAM family PF18516, as assessed using the PFAM tool (e.g. using PFAM version 33.1, and the HMM accession numbers PF07282.12 and PF18516.2). PFAM searches should ideally be performed using an E-value cut-off set at 1.0.

[0131] In some embodiments, a programmable nuclease described herein—or a programmable nuclease and guide RNA combination described herein—has an editing efficiency of at least 1%, at least 2%, at least 3%, at least 4%, at least 5%, at least 6%, at least 7%, at least 8%, at least 9%, at least 10%, at least 11%, at least 12%, at least 13%, at least 14%, at least 15%, at least 16%, at least 17%, at least 18%, at least 19%, at least 20%, at least 21%, at least 22%, at least 23%, at least 24%, at least 25%, at least 26%, at least 27%, at least 28%, at least 29%, at least 30%, at least 31%, at least 32%, at least 33%, at least 34%, at least 35%, at least 36%, at least 37%, at least 38%, at least 39%, at least 40%, at least 41%, at least 42%, at least 43%, at least 44%, at least 45%, at least 46%, at least 47%, at least 48%, at least 49%, at least 50%, at least 51%, at least 52%, at least 53%, at least 54%, at least 55%, at least 56%, at least 57%, at least 58%, at least 59%, at least 60%, at least 61%, at least 62%, at least 63%, at least 64%, at least 65%, at least 66%, at least 67%, at least 68%, at least 69%, at least 70%, at least 71%, at least 72%, at least 73%, at least 74%, at least 75%, at least 76%, at least 77%, at least 78%, at least 79%, at least 80%, at least 81%, at least 82%, at least 83%, at least 84%, at least 85%, at least 86%, at least 87%, at least 88%, at least 89%, at least 90%, at least 91%, at least 92%, at least 93%, at least 94%, at least 95%, at least 96%, at least 97%, at least 98%, at least 99%, or 100%. In some embodiments, a programmable nuclease described herein—or a programmable nuclease and guide RNA combination described herein—has an editing efficiency of at least 20%. In some embodiments, a programmable nuclease described herein—or a programmable nuclease and guide RNA combination described herein—has an editing efficiency of at least 25%. In some embodiments, a programmable nuclease described herein—or a programmable nuclease and guide RNA combination described herein—has an editing efficiency of at least 30%. In some embodiments, a programmable nuclease described herein—or a programmable nuclease and guide RNA combination described herein—has an editing efficiency of at least 35%. In some embodiments, a programmable nuclease described herein—or a programmable nuclease and guide RNA combination described herein—has an editing efficiency of at least 40%. In some embodiments, a programmable nuclease described herein—or a programmable nuclease and guide RNA combination described herein—has an editing efficiency of at least 45%. In some embodiments, a programmable nuclease described herein—or a programmable nuclease and guide RNA combination described herein—has an editing efficiency of at least 50%. In some embodiments, a programmable nuclease described herein—or a programmable nuclease and guide RNA combination described herein—has an editing efficiency of at least 55%. In some embodiments, a programmable nuclease described herein—or a programmable nuclease and guide RNA combination described herein—has an editing efficiency of at least 60%. In some embodiments, a programmable nuclease described herein—or a programmable nuclease and guide RNA combination described herein—has an editing efficiency of at least 65%. In some embodiments, a programmable nuclease described herein—or a programmable nuclease and guide RNA combination described herein—has an editing efficiency of at least 70%. In some embodiments, a programmable nuclease described herein—or a programmable nuclease and guide RNA combination described herein—has an editing efficiency of at least 75%. In some embodiments, a programmable nuclease described herein—or a programmable nuclease and guide RNA combination described herein—has an editing efficiency of at least 80%. In some embodiments, a programmable nuclease described herein—or a programmable nuclease and guide RNA combination described herein—has an editing efficiency of at least 85%. In some, a programmable nuclease described herein—or a programmable nuclease and guide RNA combination described herein—has an editing efficiency of at least 90%. In some embodiments, a programmable nuclease described herein—or a programmable nuclease and guide RNA combination described herein—has an editing efficiency of at least 95%. In some embodiments, a programmable nuclease described herein—or a programmable nuclease and guide RNA combination described herein—has an editing efficiency of at least 100%. In some embodiments, a programmable nuclease described herein—or a programmable nuclease and guide RNA combination described herein—has an editing efficiency of 42%. In some embodiments, said editing efficiency is determined by analyzing the frequency of indel mutations in a nucleic acid or gene knockout.

[0132] In some embodiments, a programmable nuclease described herein has a primary amino acid sequence length of less than 1500 amino acids, less than 1450 amino acids, less than 1400 amino acids, less than 1350 amino acids, less than 1300 amino acids, less than 1250 amino acids, less than 1200 amino acids, less than 1150 amino acids, less than 1100 amino acids, less than 1050 amino acids, less than 1000 amino acids, less than 950 amino acids, less than 900 amino acids, less than 850 amino acids, or less than 800 amino acids.

[0133] In some examples, a programmable nuclease described herein is a Type V cas nuclease. In some examples, the Type V cas nuclease, or a composition comprising the Type V cas nuclease, has an editing efficiency of at least 20%. In some examples, the Type V cas nuclease, or a composition comprising the Type V cas nuclease, has an editing efficiency of at least 25%. In some examples, the Type V cas nuclease, or a composition comprising the Type V cas nuclease, has an editing efficiency of at least 30%. In some examples, the Type V cas nuclease, or a composition comprising the Type V cas nuclease, has an editing efficiency of at least 35%. In some examples, the Type V cas nuclease, or a composition comprising the Type V cas nuclease, has an editing efficiency of at least 40%. In some examples, the Type V cas nuclease, or a composition comprising the Type V cas nuclease, has an editing efficiency of at least 45%. In some examples, the Type V cas nuclease, or a composition comprising the Type V cas nuclease, has an editing efficiency of at least 50%. In some examples, the Type V cas nuclease, or a composition comprising the Type V cas nuclease, has an editing efficiency of at least 55%. In some examples, the Type V cas nuclease, or a composition comprising the Type V cas nuclease, has an editing efficiency of at least 60%. In some examples, the Type V cas nuclease, or a composition comprising the Type V cas nuclease, has an editing efficiency of at least 65%. In some examples, the Type V cas nuclease, or a composition comprising the Type V cas nuclease, has an editing efficiency of at least 70%. In some examples, the Type V cas nuclease, or a composition comprising the Type V cas nuclease, has an editing efficiency of at least 75%. In some examples, the Type V cas nuclease, or a composition comprising the Type V cas nuclease, has an editing efficiency of at least 80%. In some examples, the Type V cas nuclease, or a composition comprising the Type V cas nuclease, has an editing efficiency of at least 85%. In some examples, the Type V cas nuclease, or a composition comprising the Type V cas nuclease, has an editing efficiency of at least 90%. In some examples, the Type V cas nuclease, or a composition comprising the Type V cas nuclease, has an editing efficiency of at least 95%. In some examples, the Type V cas nuclease, or a composition comprising the Type V cas nuclease, has an editing efficiency of 100%.

[0134] In some examples, a programmable nuclease described herein has a primary amino acid sequence length of less than 850 amino acids. In some examples, the programmable nuclease having a primary amino acid sequence length of less than 850 amino acids has an editing efficiency of at least 20%. In some examples, the programmable nuclease having a primary amino acid sequence length of less than 850 amino acids has an editing efficiency of at least 25%. In some examples, the programmable nuclease having a primary amino acid sequence length of less than 850 amino acids has an editing efficiency of at least 30%. In some examples, the programmable nuclease having a primary amino acid sequence length of less than 850 amino acids has an editing efficiency of at least 35%. In some examples, the programmable nuclease having a primary amino acid sequence length of less than 850 amino acids has an editing efficiency of at least 40%. In some examples, the programmable nuclease having a primary amino acid sequence length of less than 850 amino acids has an editing efficiency of at least 45%. In some examples, the programmable nuclease having a primary amino acid sequence length of less than 850 amino acids has an editing efficiency of at least 50%. In some examples, the programmable nuclease having a primary amino acid sequence length of less than 850 amino acids has an editing efficiency of at least 55%. In some examples, the programmable nuclease having a primary amino acid sequence length of less than 850 amino acids has an editing efficiency of at least 60%. In some examples, the programmable nuclease having a primary amino acid sequence length of less than 850 amino acids has an editing efficiency of at least 65%. In some examples, the programmable nuclease having a primary amino acid sequence length of less than 850 amino acids has an editing efficiency of at least 70%. In some examples, the programmable nuclease having a primary amino acid sequence length of less than 850 amino acids has an editing efficiency of at least 75%. In some examples, the programmable nuclease having a primary amino acid sequence length of less than 850 amino acids has an editing efficiency of at least 80%. In some examples, the programmable nuclease having a primary amino acid sequence length of less than 850 amino acids has an editing efficiency of at least 85%. In some examples, the programmable nuclease having a primary amino acid sequence length of less than 850 amino acids has an editing efficiency of at least 90%. In some examples, the programmable nuclease having a primary amino acid sequence length of less than 850 amino acids has an editing efficiency of at least 95%. In some examples, the programmable nuclease having a primary amino acid sequence length of less than 850 amino acids has an editing efficiency of 100%.

[0135] TABLE 1 provides amino acid sequences of illustrative CasΦ polypeptides that can be used in compositions and methods of the disclosure.

TABLE 1
CasΦ Amino Acid Sequences

| | SEQ ID | |
|---|---|---|
| Name | NO | Amino Acid Sequence |
| CasΦ.1 | 1 | MADTPTLFTQFLRHHLPGQRFRKDILKQAGRILANKGEDATI |
| | | AFLRGKSEESPPDFQPPVKCPIIACSRPLTEWPIYQASVAIQGY |
| | | VYGQSLAEFEASDPGCSKDGLLGWFDKTGVCTDYFSVQGLN |
| | | LIFQNARKRYIGVQTKVTNRNEKRHKKLKRINAKRIAEGLPE |
| | | LTSDEPESALDETGHLIDPPGLNTNIYCYQQVSPKPLALSEVN |
| | | QLPTAYAGYSTSGDDPIQPMVTKDRLSISKGQPGYIPEHQRA |
| | | LLSQKKHRRMRGYGLKARALLVIVRIQDDWAVIDLRSLLRN |
| | | AYWRRIVQTKEPSTITKLLKLVTGDPVLDATRMVATFTYKPG |
| | | IVQVRSAKCLKNKQGSKLFSERYLNETVSVTSIDLGSNNLVA |
| | | VATYRLVNGNTPELLQRFTLPSHLVKDFERYKQAHDTLEDSI |
| | | QKTAVASLPQGQQTEIRMWSMYGFREAQERVCQELGLADG |
| | | SIPWNVMTATSTILTDLFLARGGDPKKCMFTSEPKKKKNSKQ |
| | | VLYKIRDRAWAKMYRTLLSKETREAWNKALWGLKRGSPDY |
| | | ARLSKRKEELARRCVNYTISTAEKRAQCGRTIVALEDLNIGFF |
| | | HGRGKQEPGWVGLFTRKKENRWLMQALHKAFLELAHHRG |
| | | YHVIEVNPAYTSQTCPVCRHCDPDNRDQHNREAFHCIGCGFR |
| | | GNADLDVATHNIAMVAITGESLKRARGSVASKTPQPLAAE |
| CasΦ.2 | 2 | MPKPAVESEFSKVLKKHFPGERFRSSYMKRGGKILAAQGEE |
| | | AVVAYLQGKSEEEPPNFQPPAKCHVVTKSRDFAEWPIMKAS |
| | | EAIQRYIYALSTTERAACKPGKSSESHAAWFAATGVSNHGYS |
| | | HVQGLNLIFDHTLGRYDGVLKKVQLRNEKARARLESINASR |
| | | ADEGLPEIKAEEEEVATNETGHLLQPPGINPSFYVYQTISPQA |
| | | YRPRDEIVLPPEYAGYVRDPNAPIPLGVVRNRCDIQKGCPGYI |
| | | PEWQREAGTAISPKTGKAVTVPGLSPKKNKRMRRYWRSEKE |
| | | KAQDALLVTVRIGTDWVVIDVRGLLRNARWRTIAPKDISLN |
| | | ALLDLFTGDPVIDVRRNIVTFTYTLDACGTYARKWTLKGKQ |
| | | TKATLDKLTATQTVALVAIDLGQTNPISAGISRVTQENGALQ |
| | | CEPLDRFTLPDDLLKDISAYRIAWDRNEEELRARSVEALPEA |
| | | QQAEVRALDGVSKETARTQLCADFGLDPKRLPWDKMSSNT |
| | | TFISEALLSNSVSRDQVFFTPAPKKGAKKKAPVEVMRKDRT |
| | | WARAYKPRLSVEAQKLKNEALWALKRTSPEYLKLSRRKEEL |
| | | CRRSINYVIEKTRRRTQCQIVIPVIEDLNVRFFHGSGKRLPGW |
| | | DNFFTAKKENRWFIQGLHKAFSDLRTHRSFYVFEVRPERTSIT |
| | | CPKCGHCEVGNRDGEAFQCLSCGKTCNADLDVATHNLTQV |
| | | ALTGKTMPKREEPRDAQGTAPARKTKKASKSKAPPAEREDQ |
| | | TPAQEPSQTS |
| CasΦ.3 | 3 | MYILEMADLKSEPSLLAKLLRDRFPGKYWLPKYWKLAEKKR |
| | | LTGGEEAACEYMADKQLDSPPPNFRPPARCVILAKSRPFEDW |
| | | PVHRVASKAQSFVIGLSEQGFAALRAAPPSTADARRDWLRS |
| | | HGASEDDLMALEAQLLETIMGNAISLHGGVLKKIDNANVKA |
| | | AKRLSGRNEARLNKGLQELPPEQEGSAYGADGLLVNPPGLN |
| | | LNIYCRKSCCPKPVKNTARFVGHYPGYLRDSDSILISGTMDR |
| | | LTIIEGMPGHIPAWQREQGLVKPGGRRRRLSGSESNMRQKVD |
| | | PSTGPRRSTRSGTVNRSNQRTGRNGDPLLVEIRMKEDWVLL |
| | | DARGLLRNLRWRESKRGLSCDHEDLSLSGLLALFSGDPVIDP |
| | | VRNEVVFLYGEGIIPVRSTKPVGTRQSKKLLERQASMGPLTLI |
| | | SCDLGQTNLIAGRASAISLTHGSLGVRSSVRIELDPEIIKSFERL |
| | | RKDADRLETEILTAAKETLSDEQRGEVNSHEKDSPQTAKASL |
| | | CRELGLHPPSLPWGQMGPSTTFIADMLISHGRDDDAFLSHGE |
| | | FPTLEKRKKFDKRFCLESRPLLSSETRKALNESLWEVKRTSSE |
| | | YARLSQRKKEMARRAVNFVVEISRRKTGLSNVIVNIEDLNVR |
| | | IFHGGGKQAPGWDGFFRPKSENRWFIQAIHKAFSDLAAHHGI |
| | | PVIESDPQRTSMTCPECGHCDSKNRNGVRFLCKGCGASMDA |
| | | DFDAACRNLERVALTGKPMPKPSTSCERLLSATTGKVCSDHS |
| | | LSHDAIEKAS |
| CasΦ.4 | 4 | MEKEITELTKIRREFPNKKFSSTDMKKAGKLLKAEGPDAVRD |
| | | FLNSCQEIIGDFKPPVKTNIVSISRPFEEWPVSMVGRAIQEYYF |
| | | SLTKEELESVHPGTSSEDHKSFFNITGLSNYNYTSVQGLNLIF |
| | | KNAKAIYDGTLVKANNKNKKLEKKFNEINHKRSLEGLPIITP |
| | | DFEEPFDENGHLNNPPGINRNIYGYQGCAAKVFVPSKHKMV |
| | | SLPKEYEGYNRDPNLSLAGFRNRLEIPEGEPGHVPWFQRMDI |
| | | PEGQIGHVNKIQRFNFVHGKNSGKVKFSDKTGRVKRYHHSK |
| | | YKDATKPYKFLEESKKVSALDSILAIITIGDDWVVFDIRGLYR |
| | | NVFYRELAQKGLTAVQLLDLFTGDPVIDPKKGVVTFSYKEG |
| | | VVPVFSQKIVPRFKSRDTLEKLTSQGPVALLSVDLGQNEPVA |
| | | ARVCSLKNINDKITLDNSCRISFLDDYKKQIKDYRDSLDELEI |
| | | KIRLEAINSLETNQQVEIRDLDVFSADRAKANTVDMFDIDPN |
| | | LISWDSMSDARVSTQISDLYLKNGGDESRVYFEINNKRIKRS |
| | | DYNISQLVRPKLSDSTRKNLNDSIWKLKRTSEEYLKLSKRKL |
| | | ELSRAVVNYTIRQSKLLSGINDIVIILEDLDVKKKFNGRGIRDI |
| | | GWDNFFSSRKENRWFIPAFHKAFSELSSNRGLCVIEVNPAWT |
| | | SATCPDCGFCSKENRDGINFTCRKCGVSYHADIDVATLNIAR |
| | | VAVLGKPMSGPADRERLGDTKKPRVARSRKTMKRKDISNST |
| | | VEAMVTA |
| CasΦ.5 | 5 | MDMLDTETNYATETPAQQQDYSPKPPKKAQRAPKGFSKKA |
| | | RPEKKPPKPITLFTQKHFSGVRFLKRVIRDASKILKLSESRTITF |
| | | LEQAIERDGSAPPDVTPPVHNTIMAVTRPFEEWPEVILSKALQ |
| | | KHCYALTKKIKIKTWPKKGPGKKCLAAWSARTKIPLIPGQVQ |
| | | ATNGLFDRIGSIYDGVEKKVTNRNANKKLEYDEAIKEGRNPA |
| | | VPEYETAYNIDGTLINKPGYNPNLYITQSRTPRLITEADRPLVE |
| | | KILWQMVEKKTQSRNQARRARLEKAAHLQGLPVPKFVPEK |
| | | VDRSQKIEIRIIDPLDKIEPYMPQDRMAIKASQDGHVPYWQRP |
| | | FLSKRRNRRVRAGWGKQVSSIQAWLTGALLVIVRLGNEAFL |
| | | ADIRGALRNAQWRKLLKPDATYQSLFNLFTGDPVVNTRTNH |
| | | LTMAYREGVVNIVKSRSFKGRQTREHLLTLLGQGKTVAGVS |
| | | FDLGQKHAAGLLAAHFGLGEDGNPVFTPIQACFLPQRYLDSL |
| | | TNYRNRYDALTLDMRRQSLLALTPAQQQEFADAQRDPGGQ |
| | | AKRACCLKLNLNPDEIRWDLVSGISTMISDLYIERGGDPRDV |
| | | HQQVETKPKGKRKSEIRILKIRDGKWAYDFRPKIADETRKAQ |
| | | REQLWKLQKASSEFERLSRYKINIARAIANWALQWGRELSG |
| | | CDIVIPVLEDLNVGSKFFDGKGKWLLGWDNRFTPKKENRWF |
| | | IKVLHKAVAELAPHRGVPVYEVMPHRTSMTCPACHYCHPTN |
| | | REGDRFECQSCHVVKNTDRDVAPYNILRVAVEGKTLDRWQ |
| | | AEKKPQAEPDRPMILIDNQES |
| CasΦ.6 | 6 | MDMLDTETNYATETPAQQQDYSPKPPKKAQRAPKGFSKKA |
| | | RPEKKPPKPITLFTQKHFSGVRFLKRVIRDASKILKLSESRTITF |
| | | LEQAIERDGSAPPDVTPPVHNTIMAVTRPFEEWPEVILSKALQ |
| | | KHCYALTKKIKIKTWPKKGPGKKCLAAWSARTKIPLIPGQVQ |
| | | ATNGLFDRIGSIYDGVEKKVTNRNANKKLEYDEAIKEGRNPA |
| | | VPEYETAYNIDGTLINKPGYNPNLYITQSRTPRLITEADRPLVE |
| | | KILWQMVEKKTQSRNQARRARLEKAAHLQGLPVPKFVPEK |
| | | VDRSQKIEIRIIDPLDKIEPYMPQDRMAIKASQDGHVPYWQRP |
| | | FLSKRRNRRVRAGWGKQVSSIQAWLTGALLVIVRLGNEAFL |
| | | ADIRGALRNAQWRKLLKPDATYQSLFNLFTGDPVVNTRTNH |
| | | LTMAYREGVVDIVKSRSFKGRQTREHLLTLLGQGKTVAGVS |
| | | FDLGQKHAAGLLAAHFGLGEDGNPVFTPIQACFLPQRYLDSL |
| | | TNYRNRYDALTLDMRRQSLLALTPAQQQEFADAQRDPGGQ |
| | | AKRACCLKLNLNPDEIRWDLVSGISTMISDLYIERGGDPRDV |
| | | HQQVETKPKGKRKSEIRILKIRDGKWAYDFRPKIADETRKAQ |
| | | REQLWKLQKASSEFERLSRYKINIARAIANWALQWGRELSG |
| | | CDIVIPVLEDLNVGSKFFDGKGKWLLGWDNRFTPKKENRWF |
| | | IKVLHKAVAELAPHKGVPVYEVMPHRTSMTCPACHYCHPTN |
| | | REGDRFECQSCHVVKNTDRDVAPYNILRVAVEGKTLDRWQ |
| | | AEKKPQAEPDRPMILIDNQES |
| CasΦ.7 | 7 | MSSLPTPLELLKQKHADLFKGLQFSSKDNKMAGKVLKKDGE |
| | | EAALAFLSERGVSRGELPNFRPPAKTLVVAQSRPFEEFPIYRV |
| | | SEAIQLYVYSLSVKELETVPSGSSTKKEHQRFFQDSSVPDFGY |
| | | TSVQGLNKIFGLARGIYLGVITRGENQLQKAKSKHEALNKKR |
| | | RASGEAETEFDPTPYEYMTPERKLAKPPGVNHSIMCYVDISV |
| | | DEFDFRNPDGIVLPSEYAGYCREINTAIEKGTVDRLGHLKGG |
| | | PGYIPGHQRKESTTEGPKINFRKGRIRRSYTALYAKRDSRRVR |
| | | QGKLALPSYRHHMMRLNSNAESAILAVIFFGKDWVVFDLRG |
| | | LLRNVRWRNLFVDGSTPSTLLGMFGDPVIDPKRGVVAFCYK |
| | | EQIVPVVSKSITKMVKAPELLNKLYLKSEDPLVLVAIDLGQT |
| | | NPVGVGVYRVMNASLDYEVVTRFALESELLREIESYRQRTN |
| | | AFEAQIRAETFDAMTSEEQEEITRVRAFSASKAKENVCHRFG |
| | | MPVDAVDWATMGSNTIHIAKWVMRHGDPSLVEVLEYRKDN |
| | | EIKLDKNGVPKKVKLTDKRIANLTSIRLRFSQETSKHYNDTM |
| | | WELRRKHPVYQKLSKSKADFSRRVVNSIIRRVNHLVPRARIV |
| | | FIIEDLKNLGKVFHGSGKRELGWDSYFEPKSENRWFIQVLHK |
| | | AFSETGKHKGYYIIECWPNWTSCTCPKCSCCDSENRHGEVFR |
| | | CLACGYTCNTDFGTAPDNLVKIATTGKGLPGPKKRCKGSSK |
| | | GKNPKIARSSETGVSVTESGAPKVKKSSPTQTSQSSSQSAP |
| CasΦ.8 | 8 | MNKIEKEKTPLAKLMNENFAGLRFPFAIIKQAGKKLLKEGEL |
| | | KTIEYMTGKGSIEPLPNFKPPVKCLIVAKRRDLKYFPICKASC |
| | | EIQSYVYSLNYKDFMDYFSTPMTSQKQHEEFFKKSGLNIEYQ |
| | | NVAGLNLIFNNVKNTYNGVILKVKNRNEKLKKKAIKNNYEF |
| | | EEIKTFNDDGCLINKPGINNVIYCFQSISPKILKNITHLPKEYND |
| | | YDCSVDRNIIQKYVSRLDIPESQPGHVPEWQRKLPEFNNTNN |
| | | PRRRRKWYSNGRNISKGYSVDQVNQAKIEDSLLAQIKIGED |
| | | WIILDIRGLLRDLNRRELISYKNKLTIKDVLGFFSDYPIIDIKKN |
| | | LVTFCYKEGVIQVVSQKSIGNKKSKQLLEKLIENKPIALVSID |
| | | LGQTNPVSVKISKLNKINNKISIESFTYRFLNEEILKEIEKYRK |
| | | DYDKLELKLINEA |
| CasΦ.9 | 9 | MDMLDTETNYATETPSQQQDYSPKPPKKDRRAPKGFSKKAR |
| | | PEKKPPKPITLFTQKHFSGVRFLKRVIRDASKILKLSESRTITFL |
| | | EQAIERDGSAPPDVTPPVHNTIMAVTRPFEEWPEVILSKALQK |
| | | HCYALTKKIKIKTWPKKGPGKKCLAAWSARTKIPLIPGQVQA |
| | | TNGLFDRIGSIYDGVEKKVTNRNANKKLEYDEAIKEGRNPAV |
| | | PEYETAYNIDGTLINKPGYNPNLYITQSRTPRLITEADRPLVEK |
| | | ILWQMVEKKTQSRNQARRARLEKAAHLQGLPVPKFVPEKV |
| | | DRSQKIEIRIIDPLDKIEPYMPQDRMAIKASQDGHVPYWQRPF |
| | | LSKRRNRRVRAGWGKQVSSIQAWLTGALLVIVRLGNEAFLA |
| | | DIRGALRNAQWRKLLKPDATYQSLFNLFTGDPVVNTRTNHL |
| | | TMAYREGVVDIVKSRSFKGRQTREHLLTLLGQGKTVAGVSF |
| | | DLGQKHAAGLLAAHFGLGEDGNPVFTPIQACFLPQRYLDSLT |
| | | NYRNRYDALTLDMRRQSLLALTPAQQQEFADAQRDPGGQA |
| | | KRACCLKLNLNPDEIRWDLVSGISTMISDLYIERGGDPRDVH |
| | | QQVETKPKGKRKSEIRILKIRDGKWAYDFRPKIADETRKAQR |
| | | EQLWKLQKASSEFERLSRYKINIARAIANWALQWGRELSGC |
| | | DIVIPVLEDLNVGSKFFDGKGKWLLGWDNRFTPKKENRWFI |
| | | KVLHKAVAELAPHRGVPVYEVMPHRTSMTCPACHYCHPTN |
| | | REGDRFECQSCHVVKNTDRDVAPYNILRVAVEGKTLDRWQ |
| | | AEKKPQAEPDRPMILIDNQES |
| CasΦ.10 | 10 | MDMLDTETNYATETPSQQQDYSPKPPKKDRRAPKGFSKKAR |
| | | PEKKPPKPITLFTQKHFSGVRFLKRVIRDASKILKLSESRTITFL |
| | | EQAIERDGSAPPDVTPPVHNTIMAVTRPFEEWPEVILSKALQK |
| | | HCYALTKKIKIKTWPKKGPGKKCLAAWSARTKIPLIPGQVQA |
| | | TNGLFDRIGSIYDGVEKKVTNRNANKKLEYDEAIKEGRNPAV |
| | | PEYETAYNIDGTLINKPGYNPNLYITQSRTPRLITEADRPLVEK |
| | | ILWQMVEKKTQSRNQARRARLEKAAHLQGLPVPKFVPEKV |
| | | DRSQKIEIRIIDPLDKIEPYMPQDRMAIKASQDGHVPYWQRPF |
| | | LSKRRNRRVRAGWGKQVSSIQAWLTGALLVIVRLGNEAFLA |
| | | DIRGALRNAQWRKLLKPDATYQSLFNLFTGDPVVNTRTNHL |
| | | TMAYREGVVNIVKSRSFKGRQTREHLLTLLGQGKTVAGVSF |
| | | DLGQKHAAGLLAAHFGLGEDGNPVFTPIQACFLPQRYLDSLT |
| | | NYRNRYDALTLDMRRQSLLALTPAQQQEFADAQRDPGGQA |
| | | KRACCLKLNLNPDEIRWDLVSGISTMISDLYIERGGDPRDVH |
| | | QQVETKPKGKRKSEIRILKIRDGKWAYDFRPKIADETRKAQR |
| | | EQLWKLQKASSEFERLSRYKINIARAIANWALQWGRELSGC |
| | | DIVIPVLEDLNVGSKFFDGKGKWLLGWDNRFTPKKENRWFI |
| | | KVLHKAVAELAPHRGVPVYEVMPHRTSMTCPACHYCHPTN |
| | | REGDRFECQSCHVVKNTDRDVAPYNILRVAVEGKTLDRWQ |
| | | AEKKPQAEPDRPMILIDNQES |
| CasΦ.11 | 11 | MSNKTTPPSPLSLLLRAHFPGLKFESQDYKIAGKKLRDGGPE |
| | | AVISYLTGKGQAKLKDVKPPAKAFVIAQSRPFIEWDLVRVSR |
| | | QIQEKIFGIPATKGRPKQDGLSETAFNEAVASLEVDGKSKLNE |
| | | ETRAAFYEVLGLDAPSLHAQAQNALIKSAISIREGVLKKVEN |
| | | RNEKNLSKTKRRKEAGEEATFVEEKAHDERGYLIHPPGVNQ |
| | | TIPGYQAVVIKSCPSDFIGLPSGCLAKESAEALTDYLPHDRMT |
| | | IPKGQPGYVPEWQHPLLNRRKNRRRRDWYSASLNKPKATCS |
| | | KRSGTPNRKNSRTDQIQSGRFKGAIPVLMRFQDEWVIIDIRGL |
| | | LRNARYRKLLKEKSTIPDLLSLFTGDPSIDMRQGVCTFIYKAG |
| | | QACSAKMVKTKNAPEILSELTKSGPVVLVSIDLGQTNPIAAK |
| | | VSRVTQLSDGQLSHETLLRELLSNDSSDGKEIARYRVASDRL |
| | | RDKLANLAVERLSPEHKSEILRAKNDTPALCKARVCAALGL |
| | | NPEMIAWDKMTPYTEFLATAYLEKGGDRKVATLKPKNRPE |
| | | MLRRDIKFKGTEGVRIEVSPEAAEAYREAQWDLQRTSPEYLR |
| | | LSTWKQELTKRILNQLRHKAAKSSQCEVVVMAFEDLNIKMM |
| | | HGNGKWADGGWDAFFIKKRENRWFMQAFHKSLTELGAHK |
| | | GVPTIEVTPHRTSITCTKCGHCDKANRDGERFACQKCGFVAH |
| | | ADLEIATDNIERVALTGKPMPKPESERSGDAKKSVGARKAAF |
| | | KPEEDAEAAE |
| CasΦ.12 | 12 | MIKPTVSQFLTPGFKLIRNHSRTAGLKLKNEGEEACKKFVRE |
| | | NEIPKDECPNFQGGPAIANIIAKSREFTEWEIYQSSLAIQEVIFT |
| | | LPKDKLPEPILKEEWRAQWLSEHGLDTVPYKEAAGLNLIIKN |
| | | AVNTYKGVQVKVDNKNKNNLAKINRKNEIAKLNGEQEISFE |
| | | EIKAFDDKGYLLQKPSPNKSIYCYQSVSPKPFITSKYHNVNLP |
| | | EEYIGYYRKSNEPIVSPYQFDRLRIPIGEPGYVPKWQYTFLSK |
| | | KENKRRKLSKRIKNVSPILGIICIKKDWCVFDMRGLLRTNHW |
| | | KKYHKPTDSINDLFDYFTGDPVIDTKANVVRFRYKMENGIV |
| | | NYKPVREKKGKELLENICDQNGSCKLATVDVGQNNPVAIGL |
| | | FELKKVNGELTKTLISRHPTPIDFCNKITAYRERYDKLESSIKL |
| | | DAIKQLTSEQKIEVDNYNNNFTPQNTKQIVCSKLNINPNDLP |
| | | WDKMISGTHFISEKAQVSNKSEIYFTSTDKGKTKDVMKSDY |
| | | KWFQDYKPKLSKEVRDALSDIEWRLRRESLEFNKLSKSREQ |
| | | DARQLANWISSMCDVIGIENLVKKNNFFGGSGKREPGWDNF |
| | | YKPKKENRWWINAIHKALTELSQNKGKRVILLPAMRTSITCP |
| | | KCKYCDSKNRNGEKFNCLKCGIELNADIDVATENLATVAITA |
| | | QSMPKPTCERSGDAKKPVRARKAKAPEFHDKLAPSYTVVLR |
| | | EAV |
| CasΦ.13 | 13 | MRQPAEKTAFQVFRQEVIGTQKLSGGDAKTAGRLYKQGKM |
| | | EAAREWLLKGARDDVPPNFQPPAKCLVVAVSHPFEEWDISK |
| | | TNHDVQAYIYAQPLQAEGHLNGLSEKWEDTSADQHKLWFE |
| | | KTGVPDRGLPVQAINKIAKAAVNRAFGVVRKVENRNEKRRS |
| | | RDNRIAEHNRENGLTEVVREAPEVATNADGFLLHPPGIDPSIL |
| | | SYASVSPVPYNSSKHSFVRLPEEYQAYNVEPDAPIPQFVVED |
| | | RFAIPPGQPGYVPEWQRLKCSTNKHRRMRQWSNQDYKPKA |
| | | GRRAKPLEFQAHLTRERAKGALLVVMRIKEDWVVFDVRGL |
| | | LRNVEWRKVLSEEAREKLTLKGLLDLFTGDPVIDTKRGIVTF |
| | | LYKAEITKILSKRTVKTKNARDLLLRLTEPGEDGLRREVGLV |
| | | AVDLGQTHPIAAAIYRIGRTSAGALESTVLHRQGLREDQKEK |
| | | LKEYRKRHTALDSRLRKEAFETLSVEQQKEIVTVSGSGAQIT |
| | | KDKVCNYLGVDPSTLPWEKMGSYTHFISDDFLRRGGDPNIV |
| | | HFDRQPKKGKVSKKSQRIKRSDSQWVGRMRPRLSQETAKAR |
| | | MEADWAAQNENEEYKRLARSKQELARWCVNTLLQNTRCIT |
| | | QCDEIVVVIEDLNVKSLHGKGAREPGWDNFFTPKTENRWFIQ |
| | | ILHKTFSELPKHRGEHVIEGCPLRTSITCPACSYCDKNSRNGE |
| | | KFVCVACGATFHADFEVATYNLVRLATTGMPMPKSLERQG |
| | | GGEKAGGARKARKKAKQVEKIVVQANANVTMNGASLHSP |
| CasΦ.14 | 14 | MSSLPTPLELLKQKHADLFKGLQFSSKDNKMAGKVLKKDGE |
| | | EAALAFLSERGVSRGELPNFRPPAKTLVVAQSRPFEEFPIYRV |
| | | SEAIQLYVYSLSVKELETVPSGSSTKKEHQRFFQDSSVPDFGY |
| | | TSVQGLNKIFGLARGIYLGVITRGENQLQKAKSKHEALNKKR |
| | | RASGEAETEFDPTPYEYMTPERKLAKPPGVNHSIMCYVDISV |
| | | DEFDFRNPDGIVLPSEYAGYCREINTAIEKGTVDRLGHLKGG |
| | | PGYIPGHQRKESTTEGPKINFRKGRIRRSYTALYAKRDSRRVR |
| | | QGKLALPSYRHHMMRLNSNAESAILAVIFFGKDWVVFDLRG |
| | | LLRNVRWRNLFVDGSTPSTLLGMFGDPVIDPKRGVVAFCYK |
| | | EQIVPVVSKSITKMVKAPELLNKLYLKSEDPLVLVAIDLGQT |
| | | NPVGVGVYRVMNASLDYEVVTRFALESELLREIESYRQRTN |
| | | AFEAQIRAETFDAMTSEEQEEITRVRAFSASKAKENVCHRFG |
| | | MPVDAVDWATMGSNTIHIAKWVMRHGDPSLVEVLEYRKDN |
| | | EIKLDKNGVPKKVKLTDKRIANLTSIRLRFSQETSKHYNDTM |
| | | WELRRKHPVYQKLSKSKADFSRRVVNSIIRRVNHLVPRARIV |
| | | FIIEDLKNLGKVFHGSGKRELGWDSYFEPKSENRWFIQVLHK |
| | | AFSETGKHKGYYIIECWPNWTSCTCPKCSCCDSENRHGEVFR |
| | | CLACGYTCNTDFGTAPDNLVKIATTGKGLPGPKKRCKGSSK |
| | | GKNPKIARSSETGVSVTESGAPKVKKSSPTQTSQSSSQSAP |
| CasΦ.15 | 15 | MIKPTVSQFLTPGFKLIRNHSRTAGLKLKNEGEEACKKFVRE |
| | | NEIPKDECPNFQGGPAIANIIAKSREFTEWEIYQSSLAIQEVIFT |
| | | LPKDKLPEPILKEEWRAQWLSEHGLDTVPYKEAAGLNLIIKN |
| | | AVNTYKGVQVKVDNKNKNNLAKINRKNEIAKLNGEQEISFE |
| | | EIKAFDDKGYLLQKPSPNKSIYCYQSVSPKPFITSKYHNVNLP |
| | | EEYIGYYRKSNEPIVSPYQFDRLRIPIGEPGYVPKWQYTFLSK |
| | | KENKRRKLSKRIKNVSPILGIICIKKDWCVFDMRGLLRTNHW |
| | | KKYHKPTDSINDLFDYFTGDPVIDTKANVVRFRYKMENGIV |
| | | NYKPVREKKGKELLENICDQNGSCKLATVDVGQNNPVAIGL |
| | | FELKKVNGELTKTLISRHPTPIDFCNKITAYRERYDKLESSIKL |
| | | DAIKQLTSEQKIEVDNYNNNFTPQNTKQIVCSKLNINPNDLP |
| | | WDKMISGTHFISEKAQVSNKSEIYFTSTDKGKTKDVMKSDY |
| | | KWFQDYKPKLSKEVRDALSDIEWRLRRESLEFNKLSKSREQ |
| | | DARQLANWISSMCDVIGIENLVKKNNFFGGSGKREPGWDNF |
| | | YKPKKENRWWINAIHKALTELSQNKGKRVILLPAMRTSITCP |
| | | KCKYCDSKNRNGEKFNCLKCGIELNADIDVATENLATVAITA |
| | | QSMPKPTCERSGDAKKPVRARKAKAPEFHDKLAPSYTVVLR |
| | | EAV |
| CasΦ.16 | 16 | MSNKTTPPSPLSLLLRAHFPGLKFESQDYKIAGKKLRDGGPE |
| | | AVISYLTGKGQAKLKDVKPPAKAFVIAQSRPFIEWDLVRVSR |
| | | QIQEKIFGIPATKGRPKQDGLSETAFNEAVASLEVDGKSKLNE |
| | | ETRAAFYEVLGLDAPSLHAQAQNALIKSAISIREGVLKKVEN |
| | | RNEKNLSKTKRRKEAGEEATFVEEKAHDERGYLIHPPGVNQ |
| | | TIPGYQAVVIKSCPSDFIGLPSGCLAKESAEALTDYLPHDRMT |
| | | IPKGQPGYVPEWQHPLLNRRKNRRRRDWYSASLNKPKATCS |
| | | KRSGTPNRKNSRTDQIQSGRFKGAIPVLMRFQDEWVIIDIRGL |
| | | LRNARYRKLLKEKSTIPDLLSLFTGDPSIDMRQGVCTFIYKAG |
| | | QACSAKMVKTKNAPEILSELTKSGPVVLVSIDLGQTNPIAAK |
| | | VSRVTQLSDGQLSHETLLRELLSNDSSDGKEIARYRVASDRL |
| | | RDKLANLAVERLSPEHKSEILRAKNDTPALCKARVCAALGL |
| | | NPEMIAWDKMTPYTEFLATAYLEKGGDRKVATLKPKNRPE |
| | | MLRRDIKFKGTEGVRIEVSPEAAEAYREAQWDLQRTSPEYLR |
| | | LSTWKQELTKRILNQLRHKAAKSSQCEVVVMAFEDLNIKMM |
| | | HGNGKWADGGWDAFFIKKRENRWFMQAFHKSLTELGAHK |
| | | GVPTIEVTPHRTSITCTKCGHCDKANRDGERFACQKCGFVAH |
| | | ADLEIATDNIERVALTGKPMPKPESERSGDAKKSVGARKAAF |
| | | KPEEDAEAAE |
| CasΦ.17 | 17 | MYSLEMADLKSEPSLLAKLLRDRFPGKYWLPKYWKLAEKK |
| | | RLTGGEEAACEYMADKQLDSPPPNFRPPARCVILAKSRPFED |
| | | WPVHRVASKAQSFVIGLSEQGFAALRAAPPSTADARRDWLR |
| | | SHGASEDDLMALEAQLLETIMGNAISLHGGVLKKIDNANVK |
| | | AAKRLSGRNEARLNKGLQELPPEQEGSAYGADGLLVNPPGL |
| | | NLNIYCRKSCCPKPVKNTARFVGHYPGYLRDSDSILISGTMD |
| | | RLTIIEGMPGHIPAWQREQGLVKPGGRRRRLSGSESNMRQKV |
| | | DPSTGPRRSTRSGTVNRSNQRTGRNGDPLLVEIRMKEDWVL |
| | | LDARGLLRNLRWRESKRGLSCDHEDLSLSGLLALFSGDPVID |
| | | PVRNEVVFLYGEGIIPVRSTKPVGTRQSKKLLERQASMGPLT |
| | | LISCDLGQTNLIAGRASAISLTHGSLGVRSSVRIELDPEIIKSFE |
| | | RLRKDADRLETEILTAAKETLSDEQRGEVNSHEKDSPQTAKA |
| | | SLCRELGLHPPSLPWGQMGPSTTFIADMLISHGRDDDAFLSH |
| | | GEFPTLEKRKKFDKRFCLESRPLLSSETRKALNESLWEVKRTS |
| | | SEYARLSQRKKEMARRAVNFVVEISRRKTGLSNVIVNIEDLN |
| | | VRIFHGGGKQAPGWDGFFRPKSENRWFIQAIHKAFSDLAAH |
| | | HGIPVIESDPQRTSMTCPECGHCDSKNRNGVRFLCKGCGASM |
| | | DADFDAACRNLERVALTGKPMPKPSTSCERLLSATTGKVCS |
| | | DHSLSHDAIEKAS |
| CasΦ.18 | 18 | MEKEITELTKIRREFPNKKFSSTDMKKAGKLLKAEGPDAVRD |
| | | FLNSCQEIIGDFKPPVKTNIVSISRPFEEWPVSMVGRAIQEYYF |
| | | SLTKEELESVHPGTSSEDHKSFFNITGLSNYNYTSVQGLNLIF |
| | | KNAKAIYDGTLVKANNKNKKLEKKFNEINHKRSLEGLPIITP |
| | | DFEEPFDENGHLNNPPGINRNIYGYQGCAAKVFVPSKHKMV |
| | | SLPKEYEGYNRDPNLSLAGFRNRLEIPEGEPGHVPWFQRMDI |
| | | PEGQIGHVNKIQRFNFVHGKNSGKVKFSDKTGRVKRYHHSK |
| | | YKDATKPYKFLEESKKVSALDSILAIITIGDDWVVFDIRGLYR |
| | | NVFYRELAQKGLTAVQLLDLFTGDPVIDPKKGVVTFSYKEG |
| | | VVPVFSQKIVPRFKSRDTLEKLTSQGPVALLSVDLGQNEPVA |
| | | ARVCSLKNINDKITLDNSCRISFLDDYKKQIKDYRDSLDELEI |
| | | KIRLEAINSLETNQQVEIRDLDVFSADRAKANTVDMFDIDPN |
| | | LISWDSMSDARVSTQISDLYLKNGGDESRVYFEINNKRIKRS |
| | | DYNISQLVRPKLSDSTRKNLNDSIWKLKRTSEEYLKLSKRKL |
| | | ELSRAVVNYTIRQSKLLSGINDIVIILEDLDVKKKFNGRGIRDI |
| | | GWDNFFSSRKENRWFIPAFHKTFSELSSNRGLCVIEVNPAWT |
| | | SATCPDCGFCSKENRDGINFTCRKCGVSYHADIDVATLNIAR |
| | | VAVLGKPMSGPADRERLGDTKKPRVARSRKTMKRKDISNST |
| | | VEAMVTA |
| CasΦ.19 | 19 | MLVRTSTLVQDNKNSRSASRAFLKKPKMPKNKHIKEPTELA |
| | | KLIRELFPGQRFTRAINTQAGKILKHKGRDEVVEFLKNKGIDK |
| | | EQFMDFRPPTKARIVATSGAIEEFSYLRVSMAIQECCFGKYKF |
| | | PKEKVNGKLVLETVGLTKEELDDFLPKKYYENKKSRDRFFL |
| | | KTGICDYGYTYAQGLNEIFRNTRAIYEGVFTKVNNRNEKRRE |
| | | KKDKYNEERRSKGLSEEPYDEDESATDESGHLINPPGVNLNI |
| | | WTCEGFCKGPYVTKLSGTPGYEVILPKVFDGYNRDPNEIISC |
| | | GITDRFAIPEGEPGHIPWHQRLEIPEGQPGYVPGHQRFADTGQ |
| | | NNSGKANPNKKGRMRKYYGHGTKYTQPGEYQEVFRKGHRE |
| | | GNKRRYWEEDFRSEAHDCILYVIHIGDDWVVCDLRGPLRDA |
| | | YRRGLVPKEGITTQELCNLFSGDPVIDPKHGVVTFCYKNGLV |
| | | RAQKTISAGKKSRELLGALTSQGPIALIGVDLGQTEPVGARAF |
| | | IVNQARGSLSLPTLKGSFLLTAENSSSWNVFKGEIKAYREAID |
| | | DLAIRLKKEAVATLSVEQQTEIESYEAFSAEDAKQLACEKFG |
| | | VDSSFILWEDMTPYHTGPATYYFAKQFLKKNGGNKSLIEYIP |
| | | YQKKKSKKTPKAVLRSDYNIACCVRPKLLPETRKALNEAIRI |
| | | VQKNSDEYQRLSKRKLEFCRRVVNYLVRKAKKLTGLERVII |
| | | AIEDLKSLEKFFTGSGKRDNGWSNFFRPKKENRWFIPAFHKA |
| | | FSELAPNRGFYVIECNPARTSITDPDCGYCDGDNRDGIKFECK |
| | | KCGAKHHTDLDVAPLNIAIVAVTGRPMPKTVSNKSKRERSG |
| | | GEKSVGASRKRNHRKSKANQEMLDATSSAAE |
| CasΦ.20 | 20 | MPKIKKPTEISLLRKEVFPDLHFAKDRMRAASLVLKNEGREA |
| | | AIEYLRVNHEDKPPNFMPPAKTPYVALSRPLEQWPIAQASIAI |
| | | QKYIFGLTKDEFSATKKLLYGDKSTPNTESRKRWFEVTGVPN |
| | | FGYMSAQGLNAIFSGALARYEGVVQKVENRNKKRFEKLSEK |
| | | NQLLIEEGQPVKDYVPDTAYHTPETLQKLAENNHVRVEDLG |
| | | DMIDRLVHPPGIHRSIYGYQQVPPFAYDPDNPKGIILPKAYAG |
| | | YTRKPHDIIEAMPNRLNIPEGQAGYIPEHQRDKLKKGGRVKR |
| | | LRTTRVRVDATETVRAKAEALNAEKARLRGKEAILAVFQIEE |
| | | DWALIDMRGLLRNVYMRKLIAAGELTPTTLLGYFTETLTLDP |
| | | RRTEATFCYHLRSEGALHAEYVRHGKNTRELLLDLTKDNEKI |
| | | ALVTIDLGQRNPLAAAIFRVGRDASGDLTENSLEPVSRMLLP |
| | | QAYLDQIKAYRDAYDSFRQNIWDTALASLTPEQQRQILAYE |
| | | AYTPDDSKENVLRLLLGGNVMPDDLPWEDMTKNTHYISDR |
| | | YLADGGDPSKVWFVPGPRKRKKNAPPLKKPPKPRELVKRSD |
| | | HNISHLSEFRPQLLKETRDAFEKAKIDTERGHVGYQKLSTRK |
| | | DQLCKEILNWLEAEAVRLTRCKTMVLGLEDLNGPFFNQGKG |
| | | KVRGWVSFFRQKQENRWIVNGFRKNALARAHDKGKYILEL |
| | | WPSWTSQTCPKCKHVHADNRHGDDFVCLQCGARLHADAEV |
| | | ATWNLAVVAIQGHSLPGPVREKSNDRKKSGSARKSKKANES |
| | | GKVVGAWAAQATPKRATSKKETGTARNPVYNPLETQASCP |
| | | AP |
| CasΦ.21 | 21 | MTPSPQIARLVETPLAAALKAHHPGKKFRSDYLKKAGKILKD |
| | | QGVEAAMAHLDGKDQAEPPNFKPPAKCRIVARSREFSEWPI |
| | | VKASVEIQKYIYGLTLEERKACDPGKSSASHKAWFAKTGVN |
| | | TFGYSSVQGFNLIFGHTLGRYDGVLVKTENLNKKRAEKNER |
| | | FRAKALAEGRAEPVCPPLVTATNDTGQDVTLEDGRVVRPGQ |
| | | LLQPPGINPNIYAYQQVSPKAYVPGIIELPEEFQGYSRDPNAVI |
| | | LPLVPRDRLSIPKGQPGYVPEPHREGLTGRKDRRMRRYYETE |
| | | RGTKLKRPPLTAKGRADKANEALLVVVRIDSDWVVMDVRG |
| | | LLRNARWRRLVSKEGITLNGLLDLFTGDPVLNPKDCSVSRDT |
| | | GDPVNDPRHGVVTFCYKLGVVDVCSKDRPIKGFRTKEVLER |
| | | LTSSGTVGMVSIDLGQTNPVAAAVSRVTKGLQAETLETFTLP |
| | | DDLLGKVRAYRAKTDRMEEGFRRNALRKLTAEQQAEITRYN |
| | | DATEQQAKALVCSTYGIGPEEVPWERMTSNTTYISDHILDHG |
| | | GDPDTVFFMATKRGQNKPTLHKRKDKAWGQKFRPAISVETR |
| | | LARQAAEWELRRASLEFQKLSVWKTELCRQAVNYVMERTK |
| | | KRTQCDVIIPVIEDLPVPLFHGSGKRDPGWANFFVHKRENRW |
| | | FIDGLHKAFSELGKHRGIYVFEVCPQRTSITCPKCGHCDPDNR |
| | | DGEKFVCLSCQATLNADLDVATTNLVRVALTGKVMPRSERS |
| | | GDAQTPGPARKARTGKIKGSKPTSAPQGATQTDAKAHLSQT |
| | | GV |
| CasΦ.22 | 22 | MTPSPQIARLVETPLAAALKAHHPGKKFRSDYLKKAGKILKD |
| | | QGVEAAMAHLDGKDQAEPPNFKPPAKCRIVARSREFSEWPI |
| | | VKASVEIQKYIYGLTLEERKACDPGKSSASHKAWFAKTGVN |
| | | TFGYSSVQGFNLIFGHTLGRYDGVLVKTENLNKKRAEKNER |
| | | FRAKALAEGRAEPVCPPLVTATNDTGQDVTLEDGRVVRPGQ |
| | | LLQPPGINPNIYAYQQVSPKAYVPGIIELPEEFQGYSRDPNAVI |
| | | LPLVPRDRLSIPKGQPGYVPEPHREGLTGRKDRRMRRYYETE |
| | | RGTKLKRPPLTAKGRADKANEALLVVVRIDSDWVVMDVRG |
| | | LLRNARWRRLVSKEGITLNGLLDLFTGDPVLNPKDCSVSRDT |
| | | GDPVNDPRHGVVTFCYKLGVVDVCSKDRPIKGFRTKEVLER |
| | | LTSSGTVGMVSIDLGQTNPVAAAVSRVTKGLQAETLETFTLP |
| | | DDLLGKVRAYRAKTDRMEEGFRRNALRKLTAEQQAEITRYN |
| | | DATEQQAKALVCSTYGIGPEEVPWERMTSNTTYISDHILDHG |
| | | GDPDTVFFMATKRGQNKPTLHKRKDKAWGQKFRPAISVETR |
| | | LARQAAEWELRRASLEFQKLSVWKTELCRQAVNYVMERTK |
| | | KRTQCDVIIPVIEDLPVPLFHGSGKRDPGWANFFVHKRENRW |
| | | FIDGLHKAFSELGKHRGIYVFEVCPQRTSITCPKCGHCDPDNR |
| | | DGEKFVCLSCQATLHADLDVATTNLVRVALTGKVMPRSERS |
| | | GDAQTPGPARKARTGKIKGSKPTSAPQGATQTDAKAHLSQT |
| | | GV |
| CasΦ.23 | 23 | MKTEKPKTALTLLREEVFPGKKYRLDVLKEAGKKLSTKGRE |
| | | ATIEFLTGKDEERPQNFQPPAKTSIVAQSRPFDQWPIVQVSLA |
| | | VQKYIYGLTQSEFEANKKALYGETGKAISTESRRAWFEATGV |
| | | DNFGFTAAQGINPIFSQAVARYEGVIKKVENRNEKKLKKLTK |
| | | KNLLRLESGEEIEDFEPEATFNEEGRLLQPPGANPNIYCYQQIS |
| | | PRIYDPSDPKGVILPQIYAGYDRKPEDIISAGVPNRLAIPEGQP |
| | | GYIPEHQRAGLKTQGRIRCRASVEAKARAAILAVVHLGEDW |
| | | VVLDLRGLLRNVYWRKLASPGTLTLKGLLDFFTGGPVLDAR |
| | | RGIATFSYTLKSAAAVHAENTYKGKGTREVLLKLTENNSVA |
| | | LVTVDLGQRNPLAAMIARVSRTSQGDLTYPESVEPLTRLFLP |
| | | DPFLEEVRKYRSSYDALRLSIREAAIASLTPEQQAEIRYIEKFS |
| | | AGDAKKNVAEVFGIDPTQLPWDAMTPRTTYISDLFLRMGGD |
| | | RSRVFFEVPPKKAKKAPKKPPKKPAGPRIVKRTDGMIARLREI |
| | | RPRLSAETNKAFQEARWEGERSNVAFQKLSVRRKQFARTVV |
| | | NHLVQTAQKMSRCDTVVLGIEDLNVPFFHGRGKYQPGWEG |
| | | FFRQKKENRWLINDMHKALSERGPHRGGYVLELTPFWTSLR |
| | | CPKCGHTDSANRDGDDFVCVKCGAKLHSDLEVATANLALV |
| | | AITGQSIPRPPREQSSGKKSTGTARMKKTSGETQGKGSKACV |
| | | SEALNKIEQGTARDPVYNPLNSQVSCPAP |
| CasΦ.24 | 24 | VYNPDMKKPNNIRRIREEHFEGLCFGKDVLTKAGKIYEKDGE |
| | | EAAIDFLMGKDEEDPPNFKPPAKTTIVAQSRPFDQWPIYQVS |
| | | QAVQERVFAYTEEEFNASKEALFSGDISSKSRDFWFKTNNIS |
| | | DQGIGAQGLNTILSHAFSRYSGVIKKVENRNKKRLKKLSKKN |
| | | QLKIEEGLEILEFKPDSAFNENGLLAQPPGINPNIYGYQAVTPF |
| | | VFDPDNPGDVILPKQYEGYSRKPDDIIEKGPSRLDIPKGQPGY |
| | | VPEHQRKNLKKKGRVRLYRRTPPKTKALASILAVLQIGKDW |
| | | VLFDMRGLLRSVYMREAATPGQISAKDLLDTFTGCPVLNTR |
| | | TGEFTFCYKLRSEGALHARKIYTKGETRTLLTSLTSENNTIAL |
| | | VTVDLGQRNPAAIMISRLSRKEELSEKDIQPVSRRLLPDRYLN |
| | | ELKRYRDAYDAFRQEVRDEAFTSLCPEHQEQVQQYEALTPE |
| | | KAKNLVLKHFFGTHDPDLPWDDMTSNTHYIANLYLERGGDP |
| | | SKVFFTRPLKKDSKSKKPRKPTKRTDASISRLPEIRPKMPEDA |
| | | RKAFEKAKWEIYTGHEKFPKLAKRVNQLCREIANWIEKEAK |
| | | RLTLCDTVVVGIEDLSLPPKRGKGKFQETWQGFFRQKFENR |
| | | WVIDTLKKAIQNRAHDKGKYVLGLAPYWTSQRCPACGFIHK |
| | | SNRNGDHFKCLKCEALFHADSEVATWNLALVAVLGKGITNP |
| | | DSKKPSGQKKTGTTRKKQIKGKNKGKETVNVPPTTQEVEDII |
| | | AFFEKDDETVRNPVYKPTGT |
| CasΦ.25 | 25 | MKKPNNIRRIREEHFEGLCFGKDVLTKAGKIYEKDGEEAAID |
| | | FLMGKDEEDPPNFKPPAKTTIVAQSRPFDQWPIYQVSQAVQE |
| | | RVFAYTEEEFNASKEALFSGDISSKSRDFWFKTNNISDQGIGA |
| | | QGLNTILSHAFSRYSGVIKKVENRNKKRLKKLSKKNQLKIEE |
| | | GLEILEFKPDSAFNENGLLAQPPGINPNIYGYQAVTPFVFDPD |
| | | NPGDVILPKQYEGYSRKPDDIIEKGPSRLDIPKGQPGYVPEHQ |
| | | RKNLKKKGRVRLYRRTPPKTKALASILAVLQIGKDWVLFDM |
| | | RGLLRSVYMREAATPGQISAKDLLDTFTGCPVLNTRTGEFTF |
| | | CYKLRSEGALHARKIYTKGETRTLLTSLTSENNTIALVTVDL |
| | | GQRNPAAIMISRLSRKEELSEKDIQPVSRRLLPDRYLNELKRY |
| | | RDAYDAFRQEVRDEAFTSLCPEHQEQVQQYEALTPEKAKNL |
| | | VLKHFFGTHDPDLPWDDMTSNTHYIANLYLERGGDPSKVFF |
| | | TRPLKKDSKSKKPRKPTKRTDASISRLPEIRPKMPEDARKAFE |
| | | KAKWEIYTGHEKFPKLAKRVNQLCREIANWIEKEAKRLTLC |
| | | DTVVVGIEDLSLPPKRGKGKFQETWQGFFRQKFENRWVIDT |
| | | LKKAIQNRAHDKGKYVLGLAPYWTSQRCPACGFIHKSNRNG |
| | | DHFKCLKCEALFHADSEVATWNLALVAVLGKGITNPDSKKP |
| | | SGQKKTGTTRKKQIKGKNKGKETVNVPPTTQEVEDIIAFFEK |
| | | DDETVRNPVYKPTGT |
| CasΦ.26 | 26 | VIKTHFPAGRFRKDHQKTAGKKLKHEGEEACVEYLRNKVSD |
| | | YPPNFKPPAKGTIVAQSRPFSEWPIVRASEAIQKYVYGLTVAE |
| | | LDVFSPGTSKPSHAEWFAKTGVENYGYRQVQGLNTIFQNTV |
| | | NRFKGVLKKVENRNKKSLKRQEGANRRRVEEGLPEVPVTVE |
| | | SATDDEGRLLQPPGVNPSIYGYQGVAPRVCTDLQGFSGMSV |
| | | DFAGYRRDPDAVLVESLPEGRLSIPKGERGYVPEWQRDPERN |
| | | KFPLREGSRRQRKWYSNACHKPKPGRTSKYDPEALKKASAK |
| | | DALLVSISIGEDWAIIDVRGLLRDARRRGFTPEEGLSLNSLLG |
| | | LFTEYPVFDVQRGLITFTYKLGQVDVHSRKTVPTFRSRALLES |
| | | LVAKEEIALVSVDLGQTNPASMKVSRVRAQEGALVAEPVHR |
| | | MFLSDVLLGELSSYRKRMDAFEDAIRAQAFETMTPEQQAEIT |
| | | RVCDVSVEVARRRVCEKYSISPQDVPWGEMTGHSTFIVDAV |
| | | LRKGGDESLVYFKNKEGETLKFRDLRISRMEGVRPRLTKDTR |
| | | DALNKAVLDLKRAHPTFAKLAKQKLELARRCVNFIEREAKR |
| | | YTQCERVVFVIEDLNVGFFHGKGKRDRGWDAFFTAKKENR |
| | | WVIQALHKAFSDLGLHRGSYVIEVTPQRTSMTCPRCGHCDK |
| | | GNRNGEKFVCLQCGATLHADLEVATDNIERVALTGKAMPKP |
| | | PVRERSGDVQKAGTARKARKPLKPKQKTEPSVQEGSSDDGV |
| | | DKSPGDASRNPVYNPSDTLSI |
| CasΦ.27 | 27 | MAKAKTLAALLRELLPGQHLAPHHRWVANKLLMTSGDAAA |
| | | FVIGKSVSDPVRGSFRKDVITKAGRIFKKDGPDAAAAFLDGK |
| | | WEDRPPNFQPPAKAAIVAISRSFDEWPIVKVSCAIQQYLYALP |
| | | VQEFESSVPEARAQAHAAWFQDTGVDDCNFKSTQGLNAIFN |
| | | HGKRTYEGVLKKAQNRNDKKNLRLERINAKRAEAGQAPLV |
| | | AGPDESPTDDAGCLLHPPGINANIYCYQQVSPRPYEQSCGIQL |
| | | PPEYAGYNRLSNVAIPPMPNRLDIPQGQPGYVPEHHRHGIKK |
| | | FGRVRKRYGVVPGRNRDADGKRTRQVLTEAGAAAKARDSV |
| | | LAVIRIGDDWTVVDLRGLLRNAQWRKLVPDGGITVQGLLDL |
| | | FTGDPVIDPRRGVVTFIYKADSVGIHSEKVCRGKQSKNLLER |
| | | LCAMPEKSSTRLDCARQAVALVSVDLGQRNPVAARFSRVSL |
| | | AEGQLQAQLVSAQFLDDAMVAMIRSYREEYDRFESLVREQA |
| | | KAALSPEQLSEIVRHEADSAESVKSCVCAKFGIDPAGLSWDK |
| | | MTSGTWRIADHVQAAGGDVEWFFFKTCGKGKEIKTVRRSDF |
| | | NVAKQFRLRLSPETRKDWNDAIWELKRGNPAYVSFSKRKSE |
| | | FARRVVNDLVHRARRAVRCDEVVFAIEDLNISFFHGKGQRQ |
| | | MGWDAFFEVKQENRWFIQALHKAFVERATHKGGYVLEVAP |
| | | ARTSTTCPECRHCDPESRRGEQFCCIKCRHTCHADLEVATFNI |
| | | EQVALTGVSLPKRLSSTLL |
| CasΦ.28 | 28 | MSKEKTPPSAYAILKAKHFPDLDFEKKHKMMAGRMFKNGA |
| | | SEQEVVQYLQGKGSESLMDVKPPAKSPILAQSRPFDEWEMV |
| | | RTSRLIQETIFGIPKRGSIPKRDGLSETQFNELVASLEVGGKPM |
| | | LNKQTRAIFYGLLGIKPPTFHAMAQNILIDLAINIRKGVLKKV |
| | | DNLNEKNRKKVKRIRDAGEQDVMVPAEVTAHDDRGYLNHP |
| | | PGVNPTIPGYQGVVIPFPEGFEGLPSGMTPVDWSHVLVDYLP |
| | | HDRLSIPKGSPGYIPEWQRPLLNRHKGRRHRSWYANSLNKPR |
| | | KSRTEEAKDRQNAGKRTALIEAERLKGVLPVLMRFKEDWLII |
| | | DARGLLRNARYRGVLPEGSTLGNLIDLFSDSPRVDTRRGICTF |
| | | LYRKGRAYSTKPVKRKESKETLLKLTEKSTIALVSIDLGQTNP |
| | | LTAKLSKVRQVDGCLVAEPVLRKLIDNASEDGKEIARYRVA |
| | | HDLLRARILEDAIDLLGIYKDEVVRARSDTPDLCKERVCRFL |
| | | GLDSQAIDWDRMTPYTDFIAQAFVAKGGDPKVVTIKPNGKP |
| | | KMFRKDRSIKNMKGIRLDISKEASSAYREAQWAIQRESPDFQ |
| | | RLAVWQSQLTKRIVNQLVAWAKKCTQCDTVVLAFEDLNIG |
| | | MMHGSGKWANGGWNALFLHKQENRWFMQAFHKALTELS |
| | | AHKGIPTIEVLPHRTSITCTQCGHCHPGNRDGERFKCLKCEFL |
| | | ANTDLEIATDNIERVALTGLPMPKGERSSAKRKPGGTRKTKK |
| | | SKHSGNSPLAAE |
| CasΦ.29 | 29 | MEKAGPTSPLSVLIHKNFEGCRFQIDHLKIAGRKLAREGEAA |
| | | AIEYLLDKKCEGLPPNFQPPAKGNVIAQSRPFTEWAPYRASV |
| | | AIQKYIYSLSVDERKVCDPGSSSDSHEKWFKQTGVQNYGYT |
| | | HVQGLNLIFKHALARYDGVLKKVDNRNEKNRKKAERVNSF |
| | | RREEGLPEEVFEEEKATDETGHLLQPPGVNHSIYCYQSVRPK |
| | | PFNPRKPGGISLPEAYSGYSLKPQDELPIGSLDRLSIPPGQPGY |
| | | VPEWQRSQLTTQKHRRKRSWYSAQKWKPRTGRTSTFDPDR |
| | | LNCARAQGAILAVVRIHEDWVVFDVRGLLRNALWRELAGK |
| | | GLTVRDLLDFFTGDPVVDTKRGVVTFTYKLGKVDVHSLRTV |
| | | RGKRSKKVLEDLTLSSDVGLVTIDLGQTNVLAADYSKVTRSE |
| | | NGELLAVPLSKSFLPKHLLHEVTAYRTSYDQMEEGFRRKALL |
| | | TLTEDQQVEVTLVRDFSVESSKTKLLQLGVDVTSLPWEKMS |
| | | SNTTYISDQLLQQGADPASLFFDGERDGKPCRHKKKDRTWA |
| | | YLVRPKVSPETRKALNEALWALKNTSPEFESLSKRKIQFSRR |
| | | CMNYLLNEAKRISGCGQVVFVIEDLNVRVHHGRGKRAIGWD |
| | | NFFKPKRENRWFMQALHKAASELAIHRGMHIIEACPARSSIT |
| | | CPKCGHCDPENRCSSDREKFLCVKCGAAFHADLEVATFNLR |
| | | KVALTGTALPKSIDHSRDGLIPKGARNRKLKEPQANDEKACA |
| CasΦ.30 | 30 | MKEQSPLSSVLKSNFPGKKFLSADIRVAGRKLAQLGEAAAVE |
| | | YLSPRQRDSVPNFRPPAFCTVVAKSRPFEEWPIYKASVLLQE |
| | | QIYGMTGQEFEERCGSIPTSLSGLRQWASSVGLGAAMEGLH |
| | | VQGMNLMVKNAINRYKGVLVKVENRNKKLVEANEAKNSS |
| | | REERGLPPLRPPELGSAFGPDGRLVNPPGIDKSIRLYQGVSPV |
| | | PVVKTTGRPTVHRLDIPAGEKGHVPLWQREAGLVKEGPRRR |
| | | RMWYSNSNLKRSRKDRSAEASEARKADSVVVRVSVKEDWV |
| | | DIDVRGLLRNVAWRGIERAGESTEDLLSLFSGDPVVDPSRDS |
| | | VVFLYKEGVVDVLSKKVVGAGKSRKQLEKMVSEGPVALVS |
| | | CDLGQTNYVAARVSVLDESLSPVRSFRVDPREFPSADGSQGV |
| | | VGSLDRIRADSDRLEAKLLSEAEASLPEPVRAEIEFLRSERPSA |
| | | VAGRLCLKLGIDPRSIPWEKMGSTTSFISEALSAKGSPLALHD |
| | | GAPIKDSRFAHAARGRLSPESRKALNEALWERKSSSREYGVI |
| | | SRRKSEASRRMANAVLSESRRLTGLAVVAVNLEDLNMVSKF |
| | | FHGRGKRAPGWAGFFTPKMENRWFIRSIHKAMCDLSKHRGI |
| | | TVIESRPERTSISCPECGHCDPENRSGERFSCKSCGVSLHADFE |
| | | VATRNLERVALTGKPMPRRENLHSPEGATASRKTRKKPREA |
| | | TASTFLDLRSVLSSAENEGSGPAARAG |
| CasΦ.31 | 31 | MLPPSNKIGKSMSLKEFINKRNFKSSIIKQAGKILKKEGEEAV |
| | | KKYLDDNYVEGYKKRDFPITAKCNIVASNRKIEDFDISKFSSF |
| | | IQNYVFNLNKDNFEEFSKIKYNRKSFDELYKKIANEIGLEKPN |
| | | YENIQGEIAVIRNAINIYNGVLKKVENRNKKIQEKNQSKDPPK |
| | | LLSAFDDNGFLAERPGINETIYGYQSVRLRHLDVEKDKDIIVQ |
| | | LPDIYQKYNKKSTDKISVKKRLNKYNVDEYGKLISKRRKERI |
| | | NKDDAILCVSNFGDDWIIFDARGLLRQTYRYKLKKKGLCIKD |
| | | LLNLFTGDPIINPTKTDLKEALSLSFKDGIINNRTLKVKNYKK |
| | | CPELISELIRDKGKVAMISIDLGQTNPISYRLSKFTANNVAYIE |
| | | NGVISEDDIVKMKKWREKSDKLENLIKEEAIASLSDDEQREV |
| | | RLYENDIADNTKKKILEKFNIREEDLDFSKMSNNTYFIRDCLK |
| | | NKNIDESEFTFEKNGKKLDPTDACFAREYKNKLSELTRKKIN |
| | | EKIWEIKKNSKEYHKISIYKKETIRYIVNKLIKQSKEKSECDDII |
| | | VNIEKLQIGGNFFGGRGKRDPGWNNFFLPKEENRWFINACH |
| | | KAFSELAPHKGIIVIESDPAYTSQTCPKCENCDKENRNGEKFK |
| | | CKKCNYEANADIDVATENLEKIAKNGRRLIKNFDQLGERLPG |
| | | AEMPGGARKRKPSKSLPKNGRGAGVGSEPELINQSPSQVIA |
| CasΦ.32 | 32 | VPDKKETPLVALCKKSFPGLRFKKHDSRQAGRILKSKGEGAA |
| | | VAFLEGKGGTTQPNFKPPVKCNIVAMSRPLEEWPIYKASVVI |
| | | QKYVYAQSYEEFKATDPGKSEAGLRAWLKATRVDTDGYFN |
| | | VQGLNLIFQNARATYEGVLKKVENRNSKKVAKIEQRNEHRA |
| | | ERGLPLLTLDEPETALDETGHLRHRPGINCSVFGYQHMKLKP |
| | | YVPGSIPGVTGYSRDPSTPIAACGVDRLEIPEGQPGYVPPWDR |
| | | ENLSVKKHRRKRASWARSRGGAIDDNMLLAVVRVADDWA |
| | | LLDLRGLLRNTQYRKLLDRSVPVTIESLLNLVTNDPTLSVVK |
| | | KPGKPVRYTATLIYKQGVVPVVKAKVVKGSYVSKMLDDTT |
| | | ETFSLVGVDLGVNNLIAANALRIRPGKCVERLQAFTLPEQTV |
| | | EDFFRFRKAYDKHQENLRLAAVRSLTAEQQAEVLALDTFGP |
| | | EQAKMQVCGHLGLSVDEVPWDKVNSRSSILSDLAKERGVD |
| | | DTLYMFPFFKGKGKKRKTEIRKRWDVNWAQHFRPQLTSETR |
| | | KALNEAKWEAERNSSKYHQLSIRKKELSRHCVNYVIRTAEK |
| | | RAQCGKVIVAVEDLHHSFRRGGKGSRKSGWGGFFAAKQEG |
| | | RWLMDALFGAFCDLAVHRGYRVIKVDPYNTSRTCPECGHC |
| | | DKANRDRVNREAFICVCCGYRGNADIDVAAYNIAMVAITGV |
| | | SLRKAARASVASTPLESLAAE |
| CasΦ.33 | 33 | MSKTKELNDYQEALARRLPGVRHQKSVRRAARLVYDRQGE |
| | | DAMVAFLDGKEVDEPYTLQPPAKCHILAVSRPIEEWPIARVT |
| | | MAVQEHVYALPVHEVEKSRPETTEGSRSAWFKNSGVSNHG |
| | | VTHAQTLNAILKNAYNVYNGVIKKVENRNAKKRDSLAAKN |
| | | KSRERKGLPHFKADPPELATDEQGYLLQPPSPNSSVYLVQQH |
| | | LRTPQIDLPSGYTGPVVDPRSPIPSLIPIDRLAIPPGQPGYVPLH |
| | | DREKLTSNKHRRMKLPKSLRAQGALPVCFRVFDDWAVVDG |
| | | RGLLRHAQYRRLAPKNVSIAELLELYTGDPVIDIKRNLMTFR |
| | | FAEAVVEVTARKIVEKYHNKYLLKLTEPKGKPVREIGLVSID |
| | | LNVQRLIALAIYRVHQTGESQLALSPCLHREILPAKGLGDFDK |
| | | YKSKFNQLTEEILTAAVQTLTSAQQEEYQRYVEESSHEAKAD |
| | | LCLKYSITPHELAWDKMTSSTQYISRWLRDHGWNASDFTQIT |
| | | KGRKKVERLWSDSRWAQELKPKLSNETRRKLEDAKHDLQR |
| | | ANPEWQRLAKRKQEYSRHLANTVLSMAREYTACETVVIAIE |
| | | NLPMKGGFVDGNGSRESGWDNFFTHKKENRWMIKDIHKAL |
| | | SDLAPNRGVHVLEVNPQYTSQTCPECGHRDKANRDPIQRERF |
| | | CCTHCGAQRHADLEVATHNIAMVATTGKSLTGKSLAPQRLQ |
| | | EAAE |
| CasΦ.41 | 34 | VLLSDRIQYTDPSAPIPAMTVVDRRKIKKGEPGYVPPFMRKN |
| | | LSTNKHRRMRLSRGQKEACALPVGLRLPDGKDGWDFIIFDG |
| | | RALLRACRRLRLEVTSMDDVLDKFTGDPRIQLSPAGETIVTC |
| | | MLKPQHTGVIQQKLITGKMKDRLVQLTAEAPIAMLTVDLGE |
| | | HNLVACGAYTVGQRRGKLQSERLEAFLLPEKVLADFEGYRR |
| | | DSDEHSETLRHEALKALSKRQQREVLDMLRTGADQARESLC |
| | | YKYGLDLQALPWDKMSSNSTFIAQHLMSLGFGESATHVRYR |
| | | PKRKASERTILKYDSRFAAEEKIKLTDETRRAWNEAIWECQR |
| | | ASQEFRCLSVRKLQLARAAVNWTLTQAKQRSRCPRVVVVV |
| | | EDLNVRFMHGGGKRQEGWAGFFKARSEKRWFIQALHKAYT |
| | | ELPTNRGIHVMEVNPARTSITCTKCGYCDPENRYGEDFHCRN |
| | | PKCKVRGGHVANADLDIATENLARVALSGPMPKAPKLK |
| CasΦ.34 | 35 | MTPSFGYQMIIVTPIHHASGAWATLRLLFLNPKTSGVMLGMT |
| | | KTKSAFALMREEVFPGLLFKSADLKMAGRKFAKEGREAAIE |
| | | YLRGKDEERPANFKPPAKGDIIAQSRPFDQWPIVQVSQAIQK |
| | | YIFGLTKAEFDATKTLLYGEGNHPTTESRRRWFEATGVPDFG |
| | | FTSAQGLNAIFSSALARYEGVIQKVENRNEKRLKKLSEKNQR |
| | | LVEEGHAVEAYVPETAFHTLESLKALSEKSLVPLDDLMDKID |
| | | RLAQPPGINPCLYGYQQVAPYIYDPENPRGVVLPDLYLGYCR |
| | | KPDDPITACPNRLDIPKGQPGYIPEHQRGQLKKHGRVRRFRY |
| | | TNPQAKARAKAQTAILAVLRIDEDWVVMDLRGLLRNVYFRE |
| | | VAAPGELTARTLLDTFTGCPVLNLRSNVVTFCYDIESKGALH |
| | | AEYVRKGWATRNKLLDLTKDGQSVALLSVDLGQRHPVAVM |
| | | ISRLKRDDKGDLSEKSIQVVSRTFADQYVDKLKRYRVQYDA |
| | | LRKEIYDAALVSLPPEQQAEIRAYEAFAPGDAKANVLSVMFQ |
| | | GEVSPDELPWDKMNTNTHYISDLYLRRGGDPSRVFFVPQPST |
| | | PKKNAKKPPAPRKPVKRTDENVSHMPEFRPHLSNETREAFQ |
| | | KAKWTMERGNVRYAQLSRFLNQIVREANNWLVSEAKKLTQ |
| | | CQTVVWAIEDLHVPFFHGKGKYHETWDGFFRQKKEDRWFV |
| | | NVFHKAISERAPNKGEYVMEVAPYRTSQRCPVCGFVDADNR |
| | | HGDHFKCLRCGVELHADLEVATWNIALVAVQGHGIAGPPRE |
| | | QSCGGETAGTARKGKNIKKNKGLADAVTVEAQDSEGGSKK |
| | | DAGTARNPVYIPSESQVNCPAP |
| CasΦ.35 | 36 | MKPKTPKPPKTPVAALIDKHFPGKRFRASYLKSVGKKLKNQ |
| | | GEDVAVRFLTGKDEERPPNFQPPAKSNIVAQSRPIEEWPIHKV |
| | | SVAVQEYVYGLTVAEKEACSDAGESSSSHAAWFAKTGVENF |
| | | GYTSVQGLNKIFPPTFNRFDGVIKKVENRNEKKRQKATRINE |
| | | AKRNKGQSEDPPEAEVKATDDAGYLLQPPGINHSVYGYQSIT |
| | | LCPYTAEKFPTIKLPEEYAGYHSNPDAPIPAGVPDRLAIPEGQ |
| | | PGHVPEEHRAGLSTKKHRRVRQWYAMANWKPKPKRTSKPD |
| | | YDRLAKARAQGALLIVIRIDEDWVVVDARGLLRNVRWRSLG |
| | | KREITPNELLDLFTGDPVLDLKRGVVTFTYAEGVVNVCSRST |
| | | TKGKQTKVLLDAMTAPRDGKKRQIGMVAVDLGQTNPIAAE |
| | | YSRVGKNAAGTLEATPLSRSTLPDELLREIALYRKAHDRLEA |
| | | QLREEAVLKLTAEQQAENARYVETSEEGAKLALANLGVDTS |
| | | TLPWDAMTGWSTCISDHLINHGGDTSAVFFQTIRKGTKKLET |
| | | IKRKDSSWADIVRPRLTKETREALNDFLWELKRSHEGYEKLS |
| | | KRLEELARRAVNHVVQEVKWLTQCQDIVIVIEDLNVRNFHG |
| | | GGKRGGGWSNFFTVKKENRWFMQALHKAFSDLAAHRGIPV |
| | | LEVYPARTSITCLGCGHCDPENRDGEAFVCQQCGATFHADLE |
| | | VATRNIARVALTGEAMPKAPAREQPGGAKKRGTSRRRKLTE |
| | | VAVKSAEPTIHQAKNQQLNGTSRDPVYKGSELPAL |
| CasΦ.43 | 37 | MSEITDLLKANFKGKTFKSADMRMAGRILKKSGAQAVIKYL |
| | | SDKGAVDPPDFRPPAKCNIIAQSRPFDEWPICKASMAIQQHIY |
| | | GLTKNEFDESSPGTSSASHEQWFAKTGVDTHGFTHVQGLNLI |
| | | FQHAKKRYEGVIKKVENYNEKERKKFEGINERRSKEGMPLL |
| | | EPRLRTAFGDDGKFAEKPGVNPSIYLYQQTSPRPYDKTKHPY |
| | | VHAPFELKEITTIPTQDDRLKIPFGAPGHVPEKHRSQLSMAKH |
| | | KRRRAWYALSQNKPRPPKDGSKGRRSVRDLADLKAASLAD |
| | | AIPLVSRVGFDWVVIDGRGLLRNLRWRKLAHEGMTVEEML |
| | | GFFSGDPVIDPRRNVATFIYKAEHATVKSRKPIGGAKRAREEL |
| | | LKATASSDGVIRQVGLISVDLGQTNPVAYEISRMHQANGELV |
| | | AEHLEYGLLNDEQVNSIQRYRAAWDSMNESFRQKAIESLSM |
| | | EAQDEIMQASTGAAKRTREAVLTMFGPNATLPWSRMSSNTT |
| | | CISDALIEVGKEEETNFVTSNGPRKRTDAQWAAYLRPRVNPE |
| | | TRALLNQAVWDLMKRSDEYERLSKRKLEMARQCVNFVVAR |
| | | AEKLTQCNNIGIVLENLVVRNFHGSGRRESGWEGFFEPKREN |
| | | RWFMQVLHKAFSDLAQHRGVMVFEVHPAYSSQTCPACRYV |
| | | DPKNRSSEDRERFKCLKCGRSFNADREVATFNIREIARTGVG |
| | | LPKPDCERSRGVQTTGTARNPGRSLKSNKNPSEPKRVLQSKT |
| | | RKKITSTETQNEPLATDLKT |
| CasΦ.44 | 38 | MTPKTESPLSALCKKHFPGKRFRTNYLKDAGKILKKHGEDA |
| | | VVAFLSDKQEDEPANFCPPAKVHILAQSRPFEDWPINLASKAI |
| | | QTYVYGLTADERKTCEPGTSKESHDRWFKETGVDHHGFTSV |
| | | QGLNLIFKHTLNRYDGVIKKVETRNEKRRSSVVRINEKKAAE |
| | | GLPLIAAEAEETAFGEDGRLLQPPGVNHSIYCFQQVSPQPYSS |
| | | KKHPQVVLPHAVQGVDPDAPIPVGRPNRLDIPKGQPGYVPE |
| | | WQRPHLSMKCKRVRMWYARANWRRKPGRRSVLNEARLKE |
| | | ASAKGALPIVLVIGDDWLVMDARGLLRSVFWRRVAKPGLSL |
| | | SELLNVTPTGLFSGDPVIDPKRGLVTFTSKLGVVAVHSRKPTR |
| | | GKKSKDLLLKMTKPTDDGMPRHVGMVAIDLGQTNPVAAEY |
| | | SRVVQSDAGTLKQEPVSRGVLPDDLLKDVARYRRAYDLTEE |
| | | SIRQEAIALLSEGHRAEVTKLDQTTANETKRLLVDRGVSESLP |
| | | WEKMSSNTTYISDCLVALGKTDDVFFVPKAKKGKKETGIAV |
| | | KRKDHGWSKLLRPRTSPEARKALNENQWAVKRASPEYERLS |
| | | RRKLELGRRCVNHIIQETKRWTQCEDIVVVLEDLNVGFFHGS |
| | | GKRPDGWDNFFVSKRENRWFIQVLHKAFGDLATHRGTHVIE |
| | | VHPARTSITCIKCGHCDAGNRDGESFVCLASACGDRRHADLE |
| | | VATRNVARVAITGERMPPSEQARDVQKAGGARKRKPSARN |
| | | VKSSYPAVEPAPASP |
| CasΦ.36 | 39 | MSDNKMKKLSKEEKPLTPLQILIRKYIDKSQYPSGFKTTIIKQ |
| | | AGVRIKSVKSEQDEINLANWIISKYDPTYIKRDFNPSAKCQIIA |
| | | TSRSVADFDIVKMSNKVQEIFFASSHLDKNVFDIGKSKSDHD |
| | | SWFERNNVDRGIYTYSNVQGMNLIFSNTKNTYLGVAVKAQN |
| | | KFSSKMKRIQDINNFRITNHQSPLPIPDEIKIYDDAGFLLNPPG |
| | | VNPNIFGYQSCLLKPLENKEIISKTSFPEYSRLPADMIEVNYKI |
| | | SNRLKFSNDQKGFIQFKDKLNLFKINSQELFSKRRRLSGQPIL |
| | | LVASFGDDWVVLDGRGLLRQVYYRGIAKPGSITISELLGFFT |
| | | GDPIVDPIRGVVSLGFKPGVLSQETLKTTSARIFAEKLPNLVL |
| | | NNNVGLMSIDLGQTNPVSYRLSEITSNMSVEHICSDFLSQDQI |
| | | SSIEKAKTSLDNLEEEIAIKAVDHLSDEDKINFANFSKLNLPED |
| | | TRQSLFEKYPELIGSKLDFGSMGSGTSYIADELIKFENKDAFY |
| | | PSGKKKFDLSFSRDLRKKLSDETRKSYNDALFLEKRTNDKYL |
| | | KNAKRRKQIVRTVANSLVSKIEELGLTPVINIENLAMSGGFFD |
| | | GRGKREKGWDNFFKVKKENRWVMKDFHKAFSELSPHHGVI |
| | | VIESPPYCTSVTCTKCNFCDKKNRNGHKFTCQRCGLDANAD |
| | | LDIATENLEKVAISGKRMPGSERSSDERKVAVARKAKSPKGK |
| | | AIKGVKCTITDEPALLSANSQDCSQSTS |
| CasΦ.37 | 40 | MALSLAEVRERHFKGLRFRSSYLKRAGKILKKEGEAACVAY |
| | | LTGKDEESPPNFKPPAKCDVVAQSRPFEEWPIVQASVAVQSY |
| | | VYGLTKEAFEAFNPGTTKQSHEACLAATGIDTCGYSNVQGL |
| | | NLIFRQAKNRYEGVITKVENRNKKAKKKLTRKNEWRQKNG |
| | | HSELPEAPEELTFNDEGRLLQPPGINPSLYTYQQISPTPWSPKD |
| | | SSILPPQYAGYERDPNAPIPFGVAKDRLTIASGCPGYIPEWMR |
| | | TAGEKTNPRTQKKFMHPGLSTRKNKRMRLPRSVRSAPLGAL |
| | | LVTIHLGEDWLVLDVRGLLRNARWRGVAPKDISTQGLLNLF |
| | | TGDPVIDTRRGVVTFTYKPETVGIHSRTWLYKGKQTKEVLEK |
| | | LTQDQTVALVAIDLGQTNPVSAAASRVSRSGENLSIETVDRF |
| | | FLPDELIKELRLYRMAHDRLEERIREESTLALTEAQQAEVRAL |
| | | EHVVRDDAKNKVCAAFNLDAASLPWDQMTSNTTYLSEAIL |
| | | AQGVSRDQVFFTPNPKKGSKEPVEVMRKDRAWVYAFKAKL |
| | | SEETRKAKNEALWALKRASPDYARLSKRREELCRRSVNMVI |
| | | NRAKKRTQCQVVIPVLEDLNIGFFHGSGKRLPGWDNFFVAK |
| | | KENRWLMNGLHKSFSDLAVHRGFYVFEVMPHRTSITCPACG |
| | | HCDSENRDGEAFVCLSCKRTYHADLDVATHNLTQVAGTGLP |
| | | MPEREHPGGTKKPGGSRKPESPQTHAPILHRTDYSESADRLG |
| | | S |
| CasΦ.45 | 41 | QAVIKYLSDKGAVDPPDFRPPAKCNIIAQSRPFDEWPICKASM |
| | | AIQQHIYGLTKNEFDESSPGTSSASHEQWFAKTGVDTHGFTH |
| | | VQGLNLIFQHAKKRYEGVIKKVENYNEKERKKFEGINERRSK |
| | | EGMPLLEPRLRTAFGDDGKFAEKPGVNPSIYLYQQTSPRPYD |
| | | KTKHPYVHAPFELKEITTIPTQDDRLKIPFGAPGHVPEKHRSQ |
| | | LSMAKHKRRRAWYALSQNKPRPPKDGSKGRRSVRDLADLK |
| | | AASLADAIPLVSRVGFDWVVIDGRGLLRNLRWRKLAHEGMT |
| | | VEEMLGFFSGDPVIDPRRNVATFIYKAEHATVKSRKPIGGAK |
| | | RAREELLKATASSDGVIRQVGLISVDLGQTNPVAYEISRMHQ |
| | | ANGELVAEHLEYGLLNDEQVNSIQRYRAAWDSMNESFRQK |
| | | AIESLSMEAQDEIMQASTGAAKRTREAVLTMFGPNATLPWS |
| | | RMSSNTTCISDALIEVGKEEETNFVTSNGPRKRTDAQWAAYL |
| | | RPRVNPETRALLNQAVWDLMKRSDEYERLSKRKLEMARQC |
| | | VNFVVARAEKLTQCNNIGIVLENLVVRNFHGSGRRESGWEG |
| | | FFEPKRENRWFMQVLHKAFSDLAQHRGVMVFEVHPAYSSQ |
| | | TCPACRYVDPKNRSSEDRERFKCLKCGRSFNADREVATFNIR |
| | | EIARTGVGLPKPDCERSRDVQTPGTARKSGRSLKSQDNLSEP |
| | | KRVLQSKTRKKITSTETQNEPLATDLKT |
| CasΦ.38 | 42 | MIKEQSELSKLIEKYYPGKKFYSNDLKQAGKHLKKSEHLTAK |
| | | ESEELTVEFLKSCKEKLYDFRPPAKALIISTSRPFEEWPIYKAS |
| | | ESIQKYIYSLTKEELEKYNISTDKTSQENFFKESLIDNYGFANV |
| | | SGLNLIFQHTKAIYDGVLKKVNNRNNKILKKYKRKIEEGIEID |
| | | SPELEKAIDESGHFINPPGINKNIYCYQQVSPTIFNSFKETKIICP |
| | | FNYKRNPNDIIQKGVIDRLAIPFGEPGYIPDHQRDKVNKHKK |
| | | RIRKYYKNNENKNKDAILAKINIGEDWVLFDLRGLLRNAYW |
| | | RKLIPKQGITPQQLLDMFSGDPVIDPIKNNITFIYKESIIPIHSESI |
| | | IKTKKSKELLEKLTKDEQIALVSIDLGQTNPVAARFSRLSSDL |
| | | KPEHVSSSFLPDELKNEICRYREKSDLLEIEIKNKAIKMLSQEQ |
| | | QDEIKLVNDISSEELKNSVCKKYNIDNSKIPWDKMNGFTTFIA |
| | | DEFINNGGDKSLVYFTAKDKKSKKEKLVKLSDKKIANSFKPK |
| | | ISKETREILNKITWDEKISSNEYKKLSKRKLEFARRATNYLIN |
| | | QAKKATRLNNVVLVVEDLNSKFFHGSGKREDGWDNFFIPKK |
| | | ENRWFIQALHKSLTDVSIHRGINVIEVRPERTSITCPKCGCCD |
| | | KENRKGEDFKCIKCDSVYHADLEVATFNIEKVAITGESMPKP |
| | | DCERLGGEESIG |
| CasΦ.39 | 43 | VAFLDGKEVDEPYTLQPPAKCHILAVSRPIEEWPIARVTMAV |
| | | QEHVYALPVHEVEKSRPETTEGSRSAWFKNSGVSNHGVTHA |
| | | QTLNAILKNAYNVYNGVIKKVENRNAKKRDSLAAKNKSRER |
| | | KGLPHFKADPPELATDEQGYLLQPPSPNSSVYLVQQHLRTPQ |
| | | IDLPSGYTGPVVDPRSPIPSLIPIDRLAIPPGQPGYVPLHDREKL |
| | | TSNKHRRMKLPKSLRAQGALPVCFRVFDDWAVVDGRGLLR |
| | | HAQYRRLAPKNVSIAELLELYTGDPVIDIKRNLMTFRFAEAV |
| | | VEVTARKIVEKYHNKYLLKLTEPKGKPVREIGLVSIDLNVQR |
| | | LIALAIYRVHQTGESQLALSPCLHREILPAKGLGDFDKYKSKF |
| | | NQLTEEILTAAVQTLTSAQQEEYQRYVEESSHEAKADLCLKY |
| | | SITPHELAWDKMTSSTQYISRWLRDHGWNASDFTQITKGRK |
| | | KVERLWSDSRWAQELKPKLSNETRRKLEDAKHDLQRANPE |
| | | WQRLAKRKQEYSRHLANTVLSMAREYTACETVVIAIENLPM |
| | | KGGFVDGNGSRESGWDNFFTHKKENRWMIKDIHKALSDLAP |
| | | NRGVHVLEVNPQYTSQTCPECGHRDKANRDPIQRERFCCTH |
| | | CGAQRHADLEVATHNIAMVATTGKSLTGKSLAPQRLQ |
| CasΦ.42 | 44 | LEIPEGEPGHVPWFQRMDIPEGQIGHVNKIQRFNFVHGKNSG |
| | | KVKFSDKTGRVKRYHHSKYKDATKPYKFLEESKKVSALDSI |
| | | LAIITIGDDWVVFDIRGLYRNVFYRELAQKGLTAVQLLDLFT |
| | | GDPVIDPKKGIITFSYKEGVVPVFSQKIVSRFKSRDTLEKLTSQ |
| | | GPVALLSVDLGQNEPVAARVCSLKNINDKIALDNSCRIPFLD |
| | | DYKKQIKDYRDSLDELEIKIRLEAINSLDVNQQVEIRDLDVFS |
| | | ADRAKASTVDMFDIDPNLISWDSMSDARFSTQISDLYLKNGG |
| | | DESRVYFEINNKRIKRSDYNISQLVRPKLSDSTRKNLNDSIWK |
| | | LKRTSEEYLKLSKRKLELSRAVVNYTIRQSKLLSGINDIVIILE |
| | | DLDVKKKFNGRGIRDIGWDNFFSSRKENRWFIPAFHKSFSEL |
| | | SSNRGLCVIEVNPAWTSATCPDCGFCSKENRDGINFTCRKCG |
| | | VSYHADIDVATLNIARVAVLGKPMSGPADRERLGGTKKPRV |
| | | ARSRKDMKRKDISNGTVEVMVTA |
| CasΦ.46 | 45 | IPSFGYLDRLKIAKGQPGYIPEWQRETINPSKKVRRYWATNH |
| | | EKIRNAIPLVVFIGDDWVIIDGRGLLRDARRRKLADKNTTIEQ |
| | | LLEMVSNDPVIDSTRGIATLSYVEGVVPVRSFIPIGEKKGREY |
| | | LEKSTQKESVTLLSVDIGQINPVSCGVYKVSNGCSKIDFLDKF |
| | | FLDKKHLDAIQKYRTLQDSLEASIVNEALDEIDPSFKKEYQNI |
| | | NSQTSNDVKKSLCTEYNIDPEAISWQDITAHSTLISDYLIDNNI |
| | | TNDVYRTVNKAKYKTNDFGWYKKFSAKLSKEAREALNEKI |
| | | WELKIASSKYKKLSVRKKEIARTIANDCVKRAETYGDNVVV |
| | | AMESLTKNNKVMSGRGKRDPGWHNLGQAKVENRWFIQAIS |
| | | SAFEDKATHHGTPVLKVNPAYTSQTCPSCGHCSKDNRSSKD |
| | | RTIFVCKSCGEKFNADLDVATYNIAHVAFSGKKLSPPSEKSSA |
| | | TKKPRSARKSKKSRKS |
| CasΦ.47 | 46 | SPIEKLLNGLLVKITFGNDWIICDARGLLDNVQKGIIHKSYFT |
| | | NKSSLVDLIDLFTCNPIVNYKNNVVTFCYKEGVVDVKSFTPI |
| | | KSGPKTQENLIKKLKYSRFQNEKDACVLGVGVDVGVTNPFA |
| | | INGFKMPVDESSEWVMLNEPLFTIETSQAFREEIMAYQQRTD |
| | | EMNDQFNQQSIDLLPPEYKVEFDNLPEDINEVAKYNLLHTLN |
| | | IPNNFLWDKMSNTTQFISDYLIQIGRGTETEKTITTKKGKEKIL |
| | | TIRDVNWFNTFKPKISEETGKARTEIKRDLQKNSDQFQKLAK |
| | | SREQSCRTWVNNVTEEAKIKSGCPLIIFVIEALVKDNRVFSGK |
| | | GHRAIGWHNFGKQKNERRWWVQAIHKAFQEQGVNHGYPVI |
| | | LCPPQYTSQTCPKCNHVDRDNRSGEKFKCLKYGWIGNADLD |
| | | VGAYNIARVAITGKALSKPLEQKKIKKAKNKT |
| CasΦ.48 | 47 | LLDNVQKGIIHKSYFTNKSSLVDLIDLFTCNPIVNYKNNVVTF |
| | | CYKEGVVDVKSFTPIKSGPKTQENLIKKLKYSRFQNEKDACV |
| | | LGVGVDVGVTNPFAINGFKMPVDESSEWVMLNEPLFTIETSQ |
| | | AFREEIMAYQQRTDEMNDQFNQQSIDLLPPEYKVEFDNLPED |
| | | INEVAKYNLLHTLNIPNNFLWDKMSNTTQFISDYLIQIGRGTE |
| | | TEKTITTKKGKEKILTIRDVNWFNTFKPKISEETGKARTEIKR |
| | | DLQKNSDQFQKLAKSREQSCRTWVNNVTEEAKIKSGCPLIIF |
| | | VIEALVKDNRVFSGKGHRAIGWHNFGKQKNERRWWVQAIH |
| | | KAFQEQGVNHGYPVILCPPQYTSQTCPKCNHVDRDNRSGEK |
| | | FKCLKYGWIGNADLDVGAYNIARVAITGKALSKPLEQKKIK |
| | | KAKNKT |
| CasΦ.49 | 105 | MIKPTVSQFLTPGFKLIRNHSRTAGLKLKNEGEEACKKFVRE |
| | | NEIPKDECPNFQGGPAIANIIAKSREFTEWEIYQSSLAIQEVIFT |
| | | LPKDKLPEPILKEEWRAQWLSEHGLDTVPYKEAAGLNLIIKN |
| | | AVNTYKGVQVKVDNKNKNNLAKINRKNEIAKLNGEQEISFE |
| | | EIKAFDDKGYLLQKPSPNKSIYCYQSVSPKPFITSKYHNVNLP |
| | | EEYIGYYRKSNEPIVSPYQFDRLRIPIGEPGYVPKWQYTFLSK |
| | | KENKRRKLSKRIKNVSPILGIICIKKDWCVFDMRGLLRTNHW |
| | | KKYHKPTDSINDLFDYFTGDPVIDTKANVVRFRYKMENGIV |
| | | NYKPVREKKGKELLENICDQNGSCKLATVDVGQNNPVAIGL |
| | | FELKKVNGELTKTLISRHPTPIDFCNKITAYRERYDKLESSIKL |
| | | DAIKQLTSEQKIEVDNYNNNFTPQNTKQIVCSKLNINPNDLP |
| | | WDKMISGTHFISEKAQVSNKSEIYFTSTDKGKTKDVMKSDY |
| | | KWFQDYKPKLSKEVRDALSDIEWRLRRESLEFNKLSKSREQ |
| | | DARQLANWISSMCDVIGIENLVKKNNFFGGSGKREPGWDNF |
| | | YKPKKENRWWINAIHKALTELSQNKGKRVILLPAMRTSITCP |
| | | KCKYCDSKNRNGEKFNCLKCGIELNADIDVATENLATVAITA |
| | | QSMPKPTCERSGDAKKPVRARKAKAPEFHDKLAPSYTVVLR |
| | | EAVKRPAATKKAGQAKKKKEF |
| | | (Underlined sequence is Nuclear Localization |
| | | Signal; SEQ ID NO: 106) |
| CasΦ.12 | 107 | SNAPKKKRKVGIHGVPAAMIKPTVSQFLTPGFKLIRNHSRT |
| with NLS | | AGLKLKNEGEEACKKFVRENEIPKDECPNFQGGPAIANIIAKS |
| Signals | | REFTEWEIYQSSLAIQEVIFTLPKDKLPEPILKEEWRAQWLSE |
| | | HGLDTVPYKEAAGLNLIIKNAVNTYKGVQVKVDNKNKNNL |
| | | AKINRKNEIAKLNGEQEISFEEIKAFDDKGYLLQKPSPNKSIY |
| | | CYQSVSPKPFITSKYHNVNLPEEYIGYYRKSNEPIVSPYQFDR |
| | | LRIPIGEPGYVPKWQYTFLSKKENKRRKLSKRIKNVSPILGIICI |
| | | KKDWCVFDMRGLLRTNHWKKYHKPTDSINDLFDYFTGDPVI |
| | | DTKANVVRFRYKMENGIVNYKPVREKKGKELLENICDQNGS |
| | | CKLATVDVGQNNPVAIGLFELKKVNGELTKTLISRHPTPIDFC |
| | | NKITAYRERYDKLESSIKLDAIKQLTSEQKIEVDNYNNNFTPQ |
| | | NTKQIVCSKLNINPNDLPWDKMISGTHFISEKAQVSNKSEIYF |
| | | TSTDKGKTKDVMKSDYKWFQDYKPKLSKEVRDALSDIEWR |
| | | LRRESLEFNKLSKSREQDARQLANWISSMCDVIGIENLVKKN |
| | | NFFGGSGKREPGWDNFYKPKKENRWWINAIHKALTELSQNK |
| | | GKRVILLPAMRTSITCPKCKYCDSKNRNGEKFNCLKCGIELN |
| | | ADIDVATENLATVAITAQSMPKPTCERSGDAKKPVRARKAK |
| | | APEFHDKLAPSYTVVLREAVKRPAATKKAGQAKKKKEF |
| | | (Underlined sequences Nuclear Localization |
| | | Signals; SEQ ID NO: 112 and 106) |

[0136] In some embodiments, any of the programmable CasΦ nucleases of the present disclosure (e.g., any one of SEQ ID NO: 1 to 47, 105, or 107, or fragments or variants thereof) may include a nuclear localization signal (NLS). In some cases, one or more NLS are fused or linked to the N-terminus of the programmable CasΦ nuclease. In some embodiments, one or more NLS are fused or linked to the C-terminus of the programmable CasΦ nuclease. In some embodiments, one or more NLS are fused or linked to the N-terminus and the C-terminus of the programmable CasΦ nuclease. In some embodiments, the link between the NLS and the programmable CasΦ nuclease comprises a tag. In some cases, said NLS may have a sequence of KRPAATKKAGQAKKKKEF (SEQ ID NO: 106). The NLS can be selected to match the cell type of interest, for example several NLSs are known to be functional in different types of eukaryotic cell e.g. in mammalian cells. Suitable NLSs include the SV40 large T antigen NLS (PKKKRKV, SEQ ID NO: 110) and the c-Myc NLS (PAAKRVKLD, SEQ ID NO: 111). In some embodiments, an NLS may be the SV40 large T antigen NLS or the c-Myc NLS. NLSs that are functional in plant cells are described in Chang et al., (Plant Signal Behav. 2013 October; 8 (10):e25976). In some embodiments, an NLS sequence can be selected from the following consensus sequences: KR(K/R)R, K(K/R)RK; (P/R)XXKR(\hat{ }DE)(K/R)(SEQ ID NO: 2835); KRX(W/F/Y)XXAF (SEQ ID NO: 2489); (R/P)XXKR(K/R)(\hat{ }DE)(SEQ ID NO: 2836); LGKR(K/R)(W/F/Y) (SEQ ID NO: 2490); KRX10-12K(KR)(KR)(SEQ ID NO: 2837) or KRX10-12K(KR)X(K/R)(SEQ ID NO: 2838).

[0137] In some embodiments, the nucleoplasmin NLS (KRPAATKKAGQAKKKKEF (SEQ ID NO: 106)) is linked or fused to the C-terminus of the programmable CasΦ nuclease. In some embodiments, the SV40 NLS (PKKKRKVGIHGVPAA) (SEQ ID NO: 112) is linked or fused to the N-terminus of the programmable CasΦ nuclease. In preferred embodiments, the nucleoplasmin NLS (SEQ ID NO: 106) is linked or fused to the C-terminus of the programmable CasΦ nuclease and the SV40 NLS (SEQ ID NO: 112) is linked or fused to the N-terminus of the programmable CasΦ nuclease.

[0138] In some embodiments, the CasΦ nuclease comprises more than 200 amino acids, more than 300 amino acids, more than 400 amino acids. In some embodiments, the CasΦ nuclease comprises less than 1500 amino acids, less than 1000 amino acids or less than 900 amino acids. In some embodiments, the CasΦ nuclease comprises between 200 and 1500 amino acids, between 300 and 1000 amino acids, or between 400 and 900 amino acids. In preferred embodiments, the CasΦ nuclease comprises between 400 and 900 amino acids.

[0139] “Percent identity” and “% identity” can refer to the extent to which two sequences (nucleotide or amino acid) have the same residue at the same positions in an alignment. For example, “an amino acid sequence is X % identical to SEQ ID NO: Y” can refer to % identity of the amino acid sequence to SEQ ID NO: Y and is elaborated as X % of residues in the amino acid sequence are identical to the residues of sequence disclosed in SEQ ID NO: Y. Generally, computer programs can be employed for such calculations. Illustrative programs that compare and align pairs of sequences, include ALIGN (Myers and Miller, Comput Appl Biosci. 1988 March; 4(1):11-7), FASTA (Pearson and Lipman, Proc Natl Acad Sci USA. 1988 April; 85(8):2444-8; Pearson, Methods Enzymol. 1990; 183:63-98) and gapped BLAST (Altschul et al., Nucleic Acids Res. 1997 Sep. 1; 25(17):3389-40), BLASTP, BLASTN, or GCG (Devereux et al., Nucleic Acids Res. 1984 Jan. 11; 12(1 Pt 1):387-95).

[0140] A CasΦ polypeptide or a variant thereof can comprise at least 70%, at least 75%, at least 80%, at least 85%, at least 90%, at least 92%, at least 95%, at least 97%, at least 98%, at least 99%, or 100% sequence identity with any one of SEQ ID NO: 1 to SEQ ID NO: 47, SEQ ID NO. 105, and SEQ ID NO: 107.

[0141] A programmable nuclease or nickase of the present disclosure can comprise at least 70%, at least 75%, at least 80%, at least 85%, at least 90%, at least 92%, at least 95%, at least 97%, at least 98%, at least 99%, or 100% sequence identity with any one of SEQ ID NO: 1 to SEQ ID NO: 47, SEQ ID NO. 105, and SEQ ID NO: 107.

[0142] Compositions and methods of the disclosure can comprise a programmable nuclease comprising at least 70%, at least 75%, at least 80%, at least 85%, at least 90%, at least 92%, at least 95%, at least 97%, at least 98%, at least 99%, or 100% sequence identity to SEQ ID NO: 2.

[0143] Compositions and methods of the disclosure can comprise a programmable nuclease comprising at least 70%, at least 75%, at least 80%, at least 85%, at least 90%, at least 92%, at least 95%, at least 97%, at least 98%, at least 99%, or 100% sequence identity to SEQ ID NO: 4.

[0144] Compositions and methods of the disclosure can comprise a programmable nuclease comprising at least 70%, at least 75%, at least 80%, at least 85%, at least 90%, at least 92%, at least 95%, at least 97%, at least 98%, at least 99%, or 100% sequence identity to SEQ ID NO: 11.

[0145] Compositions and methods of the disclosure can comprise a programmable nuclease comprising at least 70%, at least 75%, at least 80%, at least 85%, at least 90%, at least 92%, at least 95%, at least 97%, at least 98%, at least 99%, or 100% sequence identity to SEQ ID NO: 17.

[0146] Compositions and methods of the disclosure can comprise a programmable nuclease comprising at least 70%, at least 75%, at least 80%, at least 85%, at least 90%, at least 92%, at least 95%, at least 97%, at least 98%, at least 99%, or 100% sequence identity to SEQ ID NO: 18.

[0147] Compositions and methods of the disclosure can comprise a programmable polypeptide or nuclease comprising at least 70%, at least 75%, at least 80%, at least 85%, at least 90%, at least 92%, at least 95%, at least 97%, at least 98%, at least 99%, or 100% sequence identity to SEQ ID NO: 12.

[0148] Compositions and methods of the disclosure can comprise a programmable polypeptide or nuclease comprising at least 70%, at least 75%, at least 80%, at least 85%, at least 90%, at least 92%, at least 95%, at least 97%, at least 98%, at least 99%, or 100% sequence identity to SEQ ID NO: 105.

[0149] Compositions and methods of the disclosure can comprise a programmable polypeptide or nuclease comprising at least 70%, at least 75%, at least 80%, at least 85%, at least 90%, at least 92%, at least 95%, at least 97%, at least 98%, at least 99%, or 100% sequence identity to SEQ ID NO: 107.

[0150] In some embodiments, the programmable nuclease comprises a sequence with at least 70% identity to SEQ ID NO: 2. In some embodiments, the programmable nuclease comprises a sequence with at least 75% identity to SEQ ID NO: 2. In some embodiments, the programmable nuclease comprises a sequence with at least 80% identity to SEQ ID NO: 2. In some embodiments, the programmable nuclease comprises a sequence with at least 85% identity to SEQ ID NO: 2. In some embodiments, the programmable nuclease comprises a sequence with at least 90% identity to SEQ ID NO: 2. In some embodiments, the programmable nuclease comprises a sequence with at least 92% identity to SEQ ID NO: 2. In some embodiments, the programmable nuclease comprises a sequence with at least 95% identity to SEQ ID NO: 2. In some embodiments, the programmable nuclease comprises a sequence with at least 97% identity to SEQ ID NO: 2. In some embodiments, the programmable nuclease comprises a sequence with at least 98% identity to SEQ ID NO: 2. In some embodiments, the programmable nuclease comprises a sequence with at least 99% identity to SEQ ID NO: 2. In some embodiments, the programmable nuclease comprises a sequence of SEQ ID NO: 2.

[0151] In some embodiments, the programmable nuclease comprises a sequence with at least 70% identity to SEQ ID NO: 4. In some embodiments, the programmable nuclease comprises a sequence with at least 75% identity to SEQ ID NO: 4. In some embodiments, the programmable nuclease comprises a sequence with at least 80% identity to SEQ ID NO: 4. In some embodiments, the programmable nuclease comprises a sequence with at least 85% identity to SEQ ID NO: 4. In some embodiments, the programmable nuclease comprises a sequence with at least 90% identity to SEQ ID NO: 4. In some embodiments, the programmable nuclease comprises a sequence with at least 92% identity to SEQ ID NO: 4. In some embodiments, the programmable nuclease comprises a sequence with at least 95% identity to SEQ ID NO: 4. In some embodiments, the programmable nuclease comprises a sequence with at least 97% identity to SEQ ID NO: 4. In some embodiments, the programmable nuclease comprises a sequence with at least 98% identity to SEQ ID NO: 4. In some embodiments, the programmable nuclease comprises a sequence with at least 99% identity to SEQ ID NO: 4. In some embodiments, the programmable nuclease comprises a sequence of SEQ ID NO: 4.

[0152] In some embodiments, the programmable nuclease comprises a sequence with at least 70% identity to SEQ ID NO: 11. In some embodiments, the programmable nuclease comprises a sequence with at least 75% identity to SEQ ID NO: 11. In some embodiments, the programmable nuclease comprises a sequence with at least 80% identity to SEQ ID NO: 11. In some embodiments, the programmable nuclease comprises a sequence with at least 85% identity to SEQ ID NO: 11. In some embodiments, the programmable nuclease comprises a sequence with at least 90% identity to SEQ ID NO: 11. In some embodiments, the programmable nuclease comprises a sequence with at least 92% identity to SEQ ID NO: 11. In some embodiments, the programmable nuclease comprises a sequence with at least 95% identity to SEQ ID NO: 11. In some embodiments, the programmable nuclease comprises a sequence with at least 97% identity to SEQ ID NO: 11. In some embodiments, the programmable nuclease comprises a sequence with at least 98% identity to SEQ ID NO: 11. In some embodiments, the programmable nuclease comprises a sequence with at least 99% identity to SEQ ID NO: 11. In some embodiments, the programmable nuclease comprises a sequence of SEQ ID NO: 11.

[0153] In some embodiments, the programmable nuclease comprises a sequence with at least 70% identity to SEQ ID NO: 12. In some embodiments, the programmable nuclease comprises a sequence with at least 75% identity to SEQ ID NO: 12. In some embodiments, the programmable nuclease comprises a sequence with at least 80% identity to SEQ ID NO: 12. In some embodiments, the programmable nuclease comprises a sequence with at least 85% identity to SEQ ID NO: 12. In some embodiments, the programmable nuclease comprises a sequence with at least 90% identity to SEQ ID NO: 12. In some embodiments, the programmable nuclease comprises a sequence with at least 92% identity to SEQ ID NO: 12. In some embodiments, the programmable nuclease comprises a sequence with at least 95% identity to SEQ ID NO: 12. In some embodiments, the programmable nuclease comprises a sequence with at least 97% identity to SEQ ID NO: 12. In some embodiments, the programmable nuclease comprises a sequence with at least 98% identity to SEQ ID NO: 12. In some embodiments, the programmable nuclease comprises a sequence with at least 99% identity to SEQ ID NO: 12. In some embodiments, the programmable nuclease comprises a sequence of SEQ ID NO: 12.

[0154] In some embodiments, the programmable nuclease comprises a sequence with at least 70% identity to SEQ ID NO: 17. In some embodiments, the programmable nuclease comprises a sequence with at least 75% identity to SEQ ID NO: 17. In some embodiments, the programmable nuclease comprises a sequence with at least 80% identity to SEQ ID NO: 17. In some embodiments, the programmable nuclease comprises a sequence with at least 85% identity to SEQ ID NO: 17. In some embodiments, the programmable nuclease comprises a sequence with at least 90% identity to SEQ ID NO: 17. In some embodiments, the programmable nuclease comprises a sequence with at least 92% identity to SEQ ID NO: 17. In some embodiments, the programmable nuclease comprises a sequence with at least 95% identity to SEQ ID NO: 17. In some embodiments, the programmable nuclease comprises a sequence with at least 97% identity to SEQ ID NO: 17. In some embodiments, the programmable nuclease comprises a sequence with at least 98% identity to SEQ ID NO: 17. In some embodiments, the programmable nuclease comprises a sequence with at least 99% identity to SEQ ID NO: 17. In some embodiments, the programmable nuclease comprises a sequence of SEQ ID NO: 17.

[0155] In some embodiments, the programmable nuclease comprises a sequence with at least 70% identity to SEQ ID NO: 18. In some embodiments, the programmable nuclease comprises a sequence with at least 75% identity to SEQ ID NO: 18. In some embodiments, the programmable nuclease comprises a sequence with at least 80% identity to SEQ ID NO: 18. In some embodiments, the programmable nuclease comprises a sequence with at least 85% identity to SEQ ID NO: 18. In some embodiments, the programmable nuclease comprises a sequence with at least 90% identity to SEQ ID NO: 18. In some embodiments, the programmable nuclease comprises a sequence with at least 92% identity to SEQ ID NO: 18. In some embodiments, the programmable nuclease comprises a sequence with at least 95% identity to SEQ ID NO: 18. In some embodiments, the programmable nuclease comprises a sequence with at least 97% identity to SEQ ID NO: 18. In some embodiments, the programmable nuclease comprises a sequence with at least 98% identity to SEQ ID NO: 18. In some embodiments, the programmable nuclease comprises a sequence with at least 99% identity to SEQ ID NO: 18. In some embodiments, the programmable nuclease comprises a sequence of SEQ ID NO: 18.

[0156] In some embodiments, the programmable nuclease comprises a sequence with at least 70% identity to SEQ ID NO: 105. In some embodiments, the programmable nuclease comprises a sequence with at least 75% identity to SEQ ID NO: 105. In some embodiments, the programmable nuclease comprises a sequence with at least 80% identity to SEQ ID NO: 105. In some embodiments, the programmable nuclease comprises a sequence with at least 85% identity to SEQ ID NO: 105. In some embodiments, the programmable nuclease comprises a sequence with at least 90% identity to SEQ ID NO: 105. In some embodiments, the programmable nuclease comprises a sequence with at least 92% identity to SEQ ID NO: 105. In some embodiments, the programmable nuclease comprises a sequence with at least 95% identity to SEQ ID NO: 105. In some embodiments, the programmable nuclease comprises a sequence with at least 97% identity to SEQ ID NO: 105. In some embodiments, the programmable nuclease comprises a sequence with at least 98% identity to SEQ ID NO: 105. In some embodiments, the programmable nuclease comprises a sequence with at least 99% identity to SEQ ID NO: 105. In some embodiments, the programmable nuclease comprises a sequence of SEQ ID NO: 105.

[0157] In some embodiments, the programmable nuclease comprises a sequence with at least 70% identity to the N-terminal 717 amino acid residues of SEQ ID NO: 105. In some embodiments, the programmable nuclease comprises a sequence with at least 75% identity to the N-terminal 717 amino acid residues of SEQ ID NO: 105. In some embodiments, the programmable nuclease comprises a sequence with at least 80% identity to the N-terminal 717 amino acid residues of SEQ ID NO: 105. In some embodiments, the programmable nuclease comprises a sequence with at least 85% identity to the N-terminal 717 amino acid residues of SEQ ID NO: 105. In some embodiments, the programmable nuclease comprises a sequence with at least 90% identity to SEQ ID NO: 105. In some embodiments, the programmable nuclease comprises a sequence with at least 95% identity to the N-terminal 717 amino acid residues of SEQ ID NO: 105. In some embodiments, the programmable nuclease comprises a sequence with at least 98% identity to the N-terminal 717 amino acid residues of SEQ ID NO: 105. In some embodiments, the programmable nuclease comprises a sequence with at least 99% identity to the N-terminal 717 amino acid residues of SEQ ID NO: 105. In some embodiments, the programmable nuclease comprises a sequence of the N-terminal 717 amino acid residues of SEQ ID NO: 105.

[0158] In some embodiments, the programmable nuclease comprises a sequence with at least 70% identity to SEQ ID NO: 106. In some embodiments, the programmable nuclease comprises a sequence with 75% identity to SEQ ID NO: 106. In some embodiments, the programmable nuclease comprises a sequence with at least 80% identity to SEQ ID NO: 106. In some embodiments, the programmable nuclease comprises a sequence with at least 85% identity to SEQ ID NO: 106. In some embodiments, the programmable nuclease comprises a sequence with at least 90% identity to SEQ ID NO: 105. In some embodiments, the programmable nuclease comprises a sequence with at least 95% identity to SEQ ID NO: 106. In some embodiments, the programmable nuclease comprises a sequence with at least 98% identity to SEQ ID NO: 106. In some embodiments, the programmable nuclease comprises a sequence with at least 99% identity to SEQ ID NO: 106. In some embodiments, the programmable nuclease comprises a sequence of SEQ ID NO: 106.

[0159] In some embodiments, the programmable nuclease comprises a sequence with at least 70% identity to SEQ ID NO: 107. In some embodiments, the programmable nuclease comprises a sequence with at least 75% identity to SEQ ID NO: 107. In some embodiments, the programmable nuclease comprises a sequence with at least 80% identity to SEQ ID NO: 107. In some embodiments, the programmable nuclease comprises a sequence with at least 85% identity to SEQ ID NO: 107. In some embodiments, the programmable nuclease comprises a sequence with at least 90% identity to SEQ ID NO: 107. In some embodiments, the programmable nuclease comprises a sequence with at least 95% identity to SEQ ID NO: 107. In some embodiments, the programmable nuclease comprises a sequence with at least 98% identity to SEQ ID NO: 107. In some embodiments, the programmable nuclease comprises a sequence with at least 99% identity to SEQ ID NO: 107. In some embodiments, the programmable nuclease comprises a sequence of SEQ ID NO: 107.

[0160] The programmable nucleases disclosed herein can be codon optimized for expression in a specific cell, for example, a bacterial cell, a plant cell, a eukaryotic cell, an animal cell, a mammalian cell, or a human cell. In some embodiments, the programmable nuclease is codon optimized for a human cell.

[0161] The programmable nucleases presented in TABLE 1 or variants or fragments thereof comprising at least 70%, at least 75%, at least 80%, at least 85%, at least 90%, at least 92%, at least 95%, at least 97%, at least 99%, or 100% sequence identity with any one of SEQ ID NO: 1-SEQ ID NO: 47, SEQ ID NO. 105, and SEQ ID NO: 107 can comprise nicking activity. Compositions and methods of the disclosure can comprise a programmable nickase comprising at least 70%, at least 75%, at least 80%, at least 85%, at least 90%, at least 92%, at least 95%, at least 97%, at least 99%, or 100% sequence identity to any one of SEQ ID NO: 1-SEQ ID NO: 47, SEQ ID NO. 105, and SEQ ID NO: 107. Compositions and methods of the disclosure can comprise a programmable nickase comprising at least 70%, at least 75%, at least 80%, at least 85%, at least 90%, at least 92%, at least 95%, at least 97%, at least 99%, or 100% sequence identity to SEQ ID NO: 2. Compositions and methods of the disclosure can comprise a programmable nickase comprising at least 70%, at least 75%, at least 80%, at least 85%, at least 90%, at least 92%, at least 95%, at least 97%, at least 99%, or 100% sequence identity to SEQ ID NO: 4. Compositions and methods of the disclosure can comprise a programmable nickase comprising at least 70%, at least 75%, at least 80%, at least 85%, at least 90%, at least 92%, at least 95%, at least 97%, at least 99%, or 100% sequence identity to SEQ ID NO: 11. Compositions and methods of the disclosure can comprise a programmable nickase comprising at least 70%, at least 75%, at least 80%, at least 85%, at least 90%, at least 92%, at least 95%, at least 97%, at least 99%, or 100% sequence identity to SEQ ID NO: 17. Compositions and methods of the disclosure can comprise a programmable nuclease comprising at least 70%, at least 75%, at least 80%, at least 85%, at least 90%, at least 92%, at least 95%, at least 97%, at least 99%, or 100% sequence identity to SEQ ID NO: 18.

[0162] The programmable nucleases presented in TABLE 1 or variants thereof comprising at least 70%, at least 75%, at least 80%, at least 85%, at least 90%, at least 92%, at least 95%, at least 97%, at least 99%, or 100% sequence identity with any one of SEQ ID NO: 1-SEQ ID NO: 47, SEQ ID NO. 105, and SEQ ID NO: 107 can comprise double-strand DNA cleavage activity. Compositions and methods of the disclosure can comprise a programmable nuclease capable of introducing a double-strand break in a target DNA sequence and comprising at least 70%, at least 75%, at least 80%, at least 85%, at least 90%, at least 92%, at least 95%, at least 97%, at least 99%, or 100% sequence identity to any one of SEQ ID NO: 1-SEQ ID NO: 47, SEQ ID NO. 105, and SEQ ID NO: 107. Compositions and methods of the disclosure can comprise a programmable nuclease with double-strand DNA cleaving activity and comprising at least 70%, at least 75%, at least 80%, at least 85%, at least 90%, at least 92%, at least 95%, at least 97%, at least 99%, or 100% sequence identity to SEQ ID NO: 12. Compositions and methods of the disclosure can comprise a programmable nuclease with double-strand DNA cleaving activity and comprising at least 70%, at least 75%, at least 80%, at least 85%, at least 90%, at least 92%, at least 95%, at least 97%, at least 99%, or 100% sequence identity to SEQ ID NO: 2. Compositions and methods of the disclosure can comprise a programmable nickase comprising at least 70%, at least 75%, at least 80%, at least 85%, at least 90%, at least 92%, at least 95%, at least 97%, at least 99%, or 100% sequence identity to SEQ ID NO: 4. Compositions and methods of the disclosure can comprise a programmable nuclease with double-strand DNA cleaving activity and comprising at least 70%, at least 75%, at least 80%, at least 85%, at least 90%, at least 92%, at least 95%, at least 97%, at least 99%, or 100% sequence identity to SEQ ID NO: 11.

[0163] The programmable nucleases presented in TABLE 1 or variants thereof comprising at least 70%, at least 75%, at least 80%, at least 85%, at least 90%, at least 92%, at least 95%, at least 97%, at least 99%, or 100% sequence identity with any one of SEQ ID NO: 1-SEQ ID NO: 47 and SEQ ID NO. 105 can comprise nickase activity and double-strand DNA cleavage activity. The ratio of the nickase activity and double-strand DNA cleavage activity can be modulated depending on the reaction conditions including for example, RNP complexing temperature, the crRNA repeat sequence in the guide nucleic acid. In some embodiments, nickase activity is reduced when RNP complexing temperature is room temperature, for example 20 to 22° C., compared to when RNP complexing temperature is 37° C. In some embodiments, the double-strand DNA cleavage activity is insensitive to RNP complexing at 37° C. compared to room temperature, or the double-strand DNA cleavage activity is reduced by 10%, 20% or 30% when complexed with a guide RNA at room temperature as compared to when complexed at 37° C. In a preferred embodiment, double-strand cleavage activity is similar when the RNP complexing temperature is room temperature and 37° C.

[0164] The programmable nucleases presented in TABLE 1 or variants thereof comprising at least 70%, at least 75%, at least 80%, at least 85%, at least 90%, at least 92%, at least 95%, at least 97%, at least 99%, or 100% sequence identity with any one of SEQ ID NO: 1-SEQ ID NO: 47, SEQ ID NO. 105, and SEQ ID NO: 107 can comprise reduced or substantially no nucleic acid cleavage activity.

[0165] In some embodiments, the N-terminal amino acid sequence of the programmable nuclease is not MISKMIKPTV (SEQ ID NO: 113). In some embodiments, the programmable nuclease does not include the amino acid sequence MISKMIKPTV (SEQ ID NO: 114).

[0166] In some embodiments, the N-terminal amino acid sequence of the programmable nuclease is not MISK (SEQ ID NO: 115). In some embodiments, the programmable nuclease does not include the amino acid sequence MISK (SEQ ID NO: 115).

[0167] In some embodiments, a composition comprises a first programmable nuclease described herein and a second programmable nuclease described herein. In some embodiments, a complex comprises a first programmable nuclease described herein and a second programmable nuclease described herein. In preferred embodiments, a complex comprises a first programmable nuclease described herein and a second programmable nuclease described herein, wherein the first and second programmable nucleases are the same programmable nuclease. In some embodiments, the first and second programmable nucleases form a dimer. In some preferred embodiments, the first and second programmable nucleases form a homodimer.

[0168] In some embodiments, a dimer comprises a first programmable nuclease described herein and a second programmable nuclease described herein. In preferred embodiments, the dimer is a homodimer wherein the first and second programmable nucleases are the same.

[0169] In some embodiments, a programmable nuclease may be a programmable nickase. The present disclosure provides compositions of programmable nickases, capable of introducing a break in a single strand of a double stranded DNA (dsDNA) (“nicking”). In some embodiments the programmable nickase is a programmable DNA nickase. Said programmable nickases can be coupled to a guide nucleic acid that targets a particular region of interest in the dsDNA. In some embodiments, two programmable nickases are combined and delivered together to generate two strand breaks. For example, a first programmable nickase can be targeted to and nicks a first region of dsDNA and a second programmable nickase can be targeted to and nicks a second region of the same dsDNA on the opposing strand. When combined and delivered together to generate nicks on opposing strands of the dsDNA, two strand breaks in the dsDNA can be generated. The strand breaks can be repaired and rejoined by non-homologous end joining (NHEJ) or homology directed repair (HDR). Thus, two programmable nickases disclosed herein can be combined to selectively edit nucleic acid sequences. This can be useful in any genome editing method, for example, used for therapeutic applications to treat a disease or disorder, or for agricultural applications.

[0170] In some embodiments, a programmable nuclease as disclosed herein can be used for genome editing purposes to generate strand breaks in order to excise a region of DNA or to subsequently introduce a region of DNA (e.g., donor DNA).

[0171] In some embodiments, the programmable nucleases (e.g., nickases) disclosed herein can be used in DNA Endonuclease Targeted CRISPR TransReporter (DETECTR) assays. In some embodiments, the programmable nuclease is a programmable nickase. A DETECTR assay can utilize the trans-cleavage abilities of some programmable nucleases to achieve fast and high-fidelity detection of a target nucleic acid in a sample. The target nucleic acid can be DNA or RNA. For example, following target DNA extraction from a biological sample, crRNA comprising a portion that is complementary to the target DNA of interest can bind to the target DNA sequence, initiating indiscriminate ssDNase activity by the programmable nuclease. In some embodiments, the extracted DNA is amplified by PCR or isothermal amplification reactions before contacting the DNA to the programmable nuclease complexed with a guide RNA. Upon hybridization with the target DNA, the trans-cleavage activity of the programmable nuclease is activated, which can then cleave an ssDNA fluorescence-quenching (FQ) reporter molecule. Cleavage of the reporter molecule can provide a fluorescent readout indicating the presence of the target DNA in the sample. In some embodiments, the programmable nucleases disclosed herein can be combined, or multiplexed, with other programmable nucleases in a DETECTR assay. The principles of the DETECTR assay are described in Chen et al. (Science 2018 Apr. 27; 360(6387):436-439) and can be modified to facilitate the use of the programmable nucleases described herein. In some embodiments, the programmable nucleases disclosed herein can be used in a specific high-sensitivity enzymatic reporter unlocking (SHERLOCK) assay. The principles of the SHERLOCK assay are described in Kellner et al. (Nat Protoc. 2019 October; 14(10):2986-3012) and can be modified to facilitate the use of the programmable nucleases described herein. Thus some embodiments provide a method of detecting a target nucleic acid in a sample, the method comprising: contacting a sample comprising a target nucleic acid with (a) a programmable CasΦ nuclease disclosed herein, (b) a guide RNA comprising a region that binds to the programmable CasΦ nuclease and an additional region that binds to the target nucleic acid, and (c) a detector nucleic acid that does not bind the guide RNA; cleaving the detector nucleic acid by the programmable CasΦ nuclease; and detecting the target nucleic acid by measuring a signal produced by the cleavage of the detector nucleic acid. In preferred embodiments, the detector nucleic acid is a single stranded DNA reporter.

[0172] The programmable nucleases of the present disclosure can show enhanced activity, as measured by enhanced cleavage of an ssDNA-FQ reporter, under certain conditions in the presence of the target DNA. For example, the programmable nucleases of the present disclosure can have variable levels of activity based on a buffer formulation, a pH level, temperature, or salt. Buffers consistent with the present disclosure include phosphate buffers, Tris buffers, and HEPES buffers. Programmable nucleases of the present disclosure can show optimal activity in phosphate buffers, Tris buffers, and HEPES buffers.

[0173] Programmable nucleases can also exhibit varying levels of nickase or double-stranded cleavage activity at different pH levels. For example, enhanced cleavage can be observed between pH 7 and pH 9. In some embodiments, programmable nuclease of the present disclosure exhibit enhanced cleavage at about pH 7, about pH 7.1, about pH 7.2, about pH 7.3, about pH 7.4, about pH 7.5, about pH 7.6, about pH 7.7, about pH 7.8, about pH 7.9, about pH 8, about pH 8.1, about pH 8.2, about pH 8.3, about pH 8.4, about pH 8.5, about pH 8.6, about pH 8.7, about pH 8.8, about pH 8.9, about pH 9, from pH 7 to 7.5, from pH 7.5 to 8, from pH 8 to 8.5, from pH 8.5 to 9, or from pH 7 to 8.5.

[0174] In some embodiments, the programmable nucleases of the present disclosure exhibit enhanced cleavage of ssDNA-FQ reporters DNA at a temperature of 25° C. to 50° C. in the presence of target DNA. For example, the programmable nucleases of the present disclosure can exhibit enhanced cleavage of an ssDNA-FQ reporter at about 25° C., about 26° C., about 27° C., about 28° C., about 29° C., about 30° C., about 31° C., about 32° C., about 33° C., about 34° C., about 35° C., about 36° C., about 37° C., about 38° C., about 39° C., about 40° C., about 41° C., about 42° C., about 43° C., about 44° C., about 45° C., about 46° C., about 47° C., about 48° C., about 49° C., about 50° C., from 30° C. to 40° C., from 35° C. to 45° C., or from 35° C. to 40° C.

[0175] The programmable nucleases of the present disclosure may not be sensitive to salt concentrations in a sample in the presence of the target DNA. Advantageously, said programmable nucleases can be active and capable of cleaving ssDNA-FQ-reporter sequences under varying salt concentrations from 25 nM salt to 200 mM salt. Various salts are consistent with this property of the programmable nucleases disclosed herein, including NaCl or KCl. The programmable nucleases of the present disclosure can be active at salt concentrations of from 25 nM to 500 nM salt, from 500 nM to 1000 nM salt, from 1000 nM to 2000 nM salt, from 2000 nM to 3000 nM salt, from 3000 nM to 4000 nM salt, from 4000 nM to 5000 nM salt, from 5000 nM to 6000 nM salt, from 6000 nM to 7000 nM salt, from 7000 nM to 8000 nM salt, from 8000 nM to 9000 nM salt, from 9000 nM to 0.01 mM salt, from 0.01 mM to 0.05 mM salt, from 0.05 mM to 0.1 mM salt, from 0.1 mM to 10 mM salt, from 10 mM to 100 mM salt, or from 100 mM to 500 mM salt. Thus, the programmable nucleases of the present disclosure can exhibit cleavage activity independent of the salt concentration in a sample.

[0176] Programmable nucleases of the present disclosure can be capable of cleaving any ssDNA-FQ reporter, regardless of its sequence. The programmable nucleases provided herein can, thus, be capable of cleaving a universal ssDNA FQ reporter. In some embodiments, the programmable nucleases provided herein cleave homopolymer ssDNA-FQ reporter comprising 5 to 20 adenines, 5 to 20 thymines, 5 to 20 cytosines, or 5 to 20 guanines. Programmable nucleases of the present disclosure, thus, are capable of cleaving ssDNA-FQ reporters also cleaved by programmable nucleases, as disclosed elsewhere herein, allowing for facile multiplexing of multiple programmable nickases and programmable nucleases in a single assay having a single ssDNA-FQ reporter.

[0177] Programmable nucleases of the present disclosure can bind a wild type protospacer adjacent motif (PAM) or a mutant PAM in a target DNA. In some embodiments the programmable CasΦ nucleases of the present disclosure recognizes and bind a protospacer adjacent motif (PAM) of 5′-TBN-3′, where B is one or more of C, G, or, T. For example, programmable CasΦ nucleases of the present disclosure may recognizes and bind a protospacer adjacent motif (PAM) of 5′-TTTN-3′. As another example, programmable CasΦ nucleases of the present disclosure may recognizes and bind a protospacer adjacent motif (PAM) of 5′-TTN-3.′ In some embodiments, the PAM is 5′-TTTA-3′, 5′-GTTK-3′, 5′-VTTK-3′, 5′-VTTS-3′, 5′-TTTS-3′ or 5′-VTTN-3′, where K is G or T, Vis A, C or G, and S is C or G. In some embodiments, the PAM is 5′-GTTB-3′, wherein B is C, G, or, T.

[0178] In some embodiments of the present disclosure, the programmable CasΦ nucleases recognize and bind a PAM of 5′-NTTN-3′.

[0179] In some embodiments, when the programmable CasΦ nuclease or a variant thereof comprises at least 70%, at least 75%, at least 80%, at least 85%, at least 90%, at least 92%, at least 95%, at least 97%, at least 99%, or 100% sequence identity with SEQ ID NO: 2, the programmable CasΦ nuclease or a variant recognizes a 5′-GTTK-3′ PAM. In some embodiments, when the programmable CasΦ nuclease or a variant thereof comprises at least 70%, at least 75%, at least 80%, at least 85%, at least 90%, at least 92%, at least 95%, at least 97%, at least 99%, or 100% sequence identity with SEQ ID NO: 2, the programmable CasΦ nuclease or a variant recognizes a 5′-NTTN-3′ PAM.

[0180] In some embodiments, when the programmable CasΦ nuclease or a variant thereof comprises at least 70%, at least 75%, at least 80%, at least 85%, at least 90%, at least 92%, at least 95%, at least 97%, at least 99%, or 100% sequence identity with SEQ ID NO: 4, the programmable CasΦ nuclease or a variant recognizes a 5′-VTTK-3′ PAM. In some embodiments, when the programmable CasΦ nuclease or a variant thereof comprises at least 70%, at least 75%, at least 80%, at least 85%, at least 90%, at least 92%, at least 95%, at least 97%, at least 99%, or 100% sequence identity with SEQ ID NO: 4, the programmable CasΦ nuclease or a variant recognizes a 5′-NTTN-3′ PAM.

[0181] In some embodiments, when the programmable CasΦ nuclease or a variant thereof comprises at least 70%, at least 75%, at least 80%, at least 85%, at least 90%, at least 92%, at least 95%, at least 97%, at least 99%, or 100% sequence identity with SEQ ID NO: 11, the programmable CasΦ nuclease or a variant recognizes a 5′-VTTS-3′ PAM. In some embodiments, when the programmable CasΦ nuclease or a variant thereof comprises at least 70%, at least 75%, at least 80%, at least 85%, at least 90%, at least 92%, at least 95%, at least 97%, at least 99%, or 100% sequence identity with SEQ ID NO: 11, the programmable CasΦ nuclease or a variant recognizes a 5′-NTTN-3′ PAM.

[0182] In some embodiments, when the programmable CasΦ nuclease or a variant thereof comprises at least 70%, at least 75%, at least 80%, at least 85%, at least 90%, at least 92%, at least 95%, at least 97%, at least 99%, or 100% sequence identity with SEQ ID NO: 12, the programmable CasΦ nuclease or a variant recognizes a 5′-TTTS-3′ PAM. In some embodiments, when the programmable CasΦ nuclease or a variant thereof comprises at least 70%, at least 75%, at least 80%, at least 85%, at least 90%, at least 92%, at least 95%, at least 97%, at least 99%, or 100% sequence identity with SEQ ID NO: 12, the programmable CasΦ nuclease or a variant recognizes a 5′-NTTN-3′ PAM.

[0183] In some embodiments, when the programmable CasΦ nuclease or a variant thereof comprises at least 70%, at least 75%, at least 80%, at least 85%, at least 90%, at least 92%, at least 95%, at least 97%, at least 99%, or 100% sequence identity with SEQ ID NO: 18, the programmable CasΦ nuclease or a variant recognizes a 5′-VTTN-3′ PAM.

[0184] In some embodiments, when the programmable CasΦ nuclease or a variant thereof comprises at least 70%, at least 75%, at least 80%, at least 85%, at least 90%, at least 92%, at least 95%, at least 97%, at least 99%, or 100% sequence identity with SEQ ID NO: 20, the programmable CasΦ nuclease or a variant recognizes a 5′-NTNN-3′ PAM.

[0185] In some embodiments, when the programmable CasΦ nuclease or a variant thereof comprises at least 70%, at least 75%, at least 80%, at least 85%, at least 90%, at least 92%, at least 95%, at least 97%, at least 99%, or 100% sequence identity with SEQ ID NO: 20, the programmable CasΦ nuclease or a variant recognizes a 5′-TTN-3′ PAM.

[0186] In some embodiments, when the programmable CasΦ nuclease or a variant thereof comprises at least 70%, at least 75%, at least 80%, at least 85%, at least 90%, at least 92%, at least 95%, at least 97%, at least 99%, or 100% sequence identity with SEQ ID NO: 26, the programmable CasΦ nuclease or a variant recognizes a 5′-NTTG-3′ PAM.

[0187] In some embodiments, when the programmable CasΦ nuclease or a variant thereof comprises at least 70%, at least 75%, at least 80%, at least 85%, at least 90%, at least 92%, at least 95%, at least 97%, at least 99%, or 100% sequence identity with SEQ ID NO: 32, the programmable CasΦ nuclease or a variant recognizes a 5′-GTTB-3′ PAM, wherein B is C, G, or N.

[0188] In some embodiments, when the programmable CasΦ nuclease or a variant thereof comprises at least 70%, at least 75%, at least 80%, at least 85%, at least 90%, at least 92%, at least 95%, at least 97%, at least 99%, or 100% sequence identity with SEQ ID NO: 42, the programmable CasΦ nuclease or a variant recognizes a 5′-GTTN-3′ PAM.

[0189] In some embodiments, when the programmable CasΦ nuclease or a variant thereof comprises at least 70%, at least 75%, at least 80%, at least 85%, at least 90%, at least 92%, at least 95%, at least 97%, at least 99%, or 100% sequence identity with SEQ ID NO: 41, the programmable CasΦ nuclease or a variant recognizes a 5′-NTTN-3′ PAM.

[0190] In some embodiments, when the programmable CasΦ nuclease or a variant thereof comprises at least 70%, at least 75%, at least 80%, at least 85%, at least 90%, at least 92%, at least 95%, at least 97%, at least 99%, or 100% sequence identity with SEQ ID NO: 24, the programmable CasΦ nuclease or a variant recognizes a 5′-NTNN-3′ PAM.

[0191] In some embodiments, when the programmable CasΦ nuclease or a variant thereof comprises at least 70%, at least 75%, at least 80%, at least 85%, at least 90%, at least 92%, at least 95%, at least 97%, at least 99%, or 100% sequence identity with SEQ ID NO: 25, the programmable CasΦ nuclease or a variant recognizes a 5′-NTNN-3′ PAM.

[0192] The programmable nucleases and other reagents (e.g., a guide nucleic acid) can be formulated in a buffer disclosed herein. A wide variety of buffered solutions are compatible with the methods, compositions, reagents, enzymes, and kits disclosed herein. Buffers are compatible with different programmable nucleases described herein. Any of the methods, compositions, reagents, enzymes, or kits disclosed herein may comprise a buffer. These buffers may be compatible with the other reagents, samples, and support mediums as described herein for detection of an ailment, such as a disease, cancer, or genetic disorder, or genetic information, such as for phenotyping, genotyping, or determining ancestry. A buffer, as described herein, can enhance the cis- or trans-cleavage rates of any of the programmable nucleases described herein. The buffer can increase the discrimination of the programmable nucleases for the target nucleic acid. The methods as described herein can be performed in the buffer.

[0193] In some embodiments, a buffer may comprise one or more of a buffering agent, a salt, a crowding agent, or a detergent, or any combination thereof. A buffer may comprise a reducing agent. A buffer may comprise a competitor. Exemplary buffering agents include HEPES, TRIS, MES, ADA, PIPES, ACES, MOPSO, BIS-TRIS propane, BES, MOPS, TES, DISO, Trizma, TRICINE, GLY-GLY, HEPPS, BICINE, TAPS, A MPD, A MPSO, CHES, CAPSO, AMP, CAPS, phosphate, citrate, acetate, imidazole, or any combination thereof. A buffering agent may be compatible with a programmable nuclease. A buffer compatible with a programmable nuclease may comprise a buffering agent at a concentration of from 1 mM to 200 mM. A buffer compatible with a programmable nuclease may comprise a buffering agent at a concentration of from 10 mM to 30 mM. A buffer compatible with a programmable nuclease may comprise a buffering agent at a concentration of about 20 mM. A composition (e.g., a composition comprising a programmable nuclease) may have a pH of from 2.5 to 3.5. A composition (e.g., a composition comprising a programmable nuclease) may have a pH of from 3 to 4. A composition (e.g., a composition comprising a programmable nuclease) may have a pH of from 3.5 to 4.5. A composition (e.g., a composition comprising a programmable nuclease) may have a pH of from 4 to 5. A composition (e.g., a composition comprising a programmable nuclease) may have a pH of from 4.5 to 5.5. A composition (e.g., a composition comprising a programmable nuclease) may have a pH of from 5 to 6. A composition (e.g., a composition comprising a programmable nuclease) may have a pH of from 5.5 to 6.5. A composition (e.g., a composition comprising a programmable nuclease) may have a pH of from 6 to 7. A composition (e.g., a composition comprising a programmable nuclease) may have a pH of from 6.5 to 7.5. A composition (e.g., a composition comprising a programmable nuclease) may have a pH of from 7 to 8. A composition (e.g., a composition comprising a programmable nuclease) may have a pH of from 7.5 to 8.5. A composition (e.g., a composition comprising a programmable nuclease) may have a pH of from 8 to 9. A composition (e.g., a composition comprising a programmable nuclease) may have a pH of from 8.5 to 9.5. A composition (e.g., a composition comprising a programmable nuclease) may have a pH of from 9 to 10. A composition (e.g., a composition comprising a programmable nuclease) may have a pH of from 9.5 to 10.5.

[0194] A buffer may comprise a salt. Exemplary salts include NaCl, KCl, magnesium acetate, potassium acetate, CaCl₂ and MgCl₂. A buffer may comprise potassium acetate, magnesium acetate, sodium chloride, magnesium chloride, or any combination thereof. A buffer compatible with a programmable nuclease may comprise a salt at a concentration of from 5 mM to 100 mM. A buffer compatible with a programmable nuclease may comprise a salt at a concentration of from 5 mM to 10 mM. In some embodiments, a buffer compatible with a programmable nuclease comprises a salt from 1 mM to 60 mM. In some embodiments, a buffer compatible with a programmable nuclease comprises a salt from 1 mM to 10 mM. In some embodiments, a buffer compatible with a programmable nuclease comprises a salt at about 105 mM. In some embodiments, a buffer compatible with a programmable nuclease comprises a salt at about 55 mM. In some embodiments, a buffer compatible with a programmable nuclease comprises a salt at about 7 mM. In some embodiments, a buffer compatible with a programmable nuclease comprises a salt, wherein the salt comprises potassium acetate and magnesium acetate. In some embodiments, a buffer compatible with a programmable nuclease comprises a salt, wherein the salt comprises sodium chloride and magnesium chloride. In some embodiments, a buffer compatible with a programmable nuclease comprises a salt, wherein the salt comprises potassium chloride and magnesium chloride.

[0195] A buffer may comprise a crowding agent. Exemplary crowding agents include glycerol and bovine serum albumin. A buffer may comprise glycerol. A crowding agent may reduce the volume of solvent available for other molecules in the solution, thereby increasing the effective concentrations of said molecules. A buffer compatible with a programmable nuclease may comprise a crowding agent at a concentration of from 0.01% (v/v) to 10% (v/v). A buffer compatible with a programmable nuclease may comprise a crowding agent at a concentration of from 0.5% (v/v) to 10% (v/v).

[0196] A buffer may comprise a detergent. Exemplary detergents include Tween, Triton-X, and IGEPAL. A buffer may comprise Tween, Triton-X, or any combination thereof. A buffer compatible with a programmable nuclease may comprise Triton-X. A buffer compatible with a programmable nuclease may comprise IGEPAL CA-630. In some embodiments, a buffer compatible with a programmable nuclease comprises a detergent at a concentration of 2% (v/v) or less. A buffer compatible with a programmable nuclease may comprise a detergent at a concentration of 2% (v/v) or less. A buffer compatible with a programmable nuclease may comprise a detergent at a concentration of from 0.00001% (v/v) to 0.01% (v/v). A buffer compatible with a programmable nuclease may comprise a detergent at a concentration of about 0.01% (v/v).

[0197] A buffer may comprise a reducing agent. Exemplary reducing agents comprise dithiothreitol (DTT), ß-mercaptoethanol (BME), or tris(2-carboxyethyl) phosphine (TCEP). A buffer compatible with a programmable nuclease may comprise DTT. A buffer compatible with a programmable nuclease may comprise a reducing agent at a concentration of from 0.01 mM to 100 mM. A buffer compatible with a programmable nuclease may comprise a reducing agent at a concentration of from 0.1 mM to 10 mM. A buffer compatible with a programmable nuclease may comprise a reducing agent at a concentration of from 0.5 mM to 2 mM. A buffer compatible with a programmable nuclease may comprise a reducing agent at a concentration of from 0.01 mM to 100 mM. A buffer compatible with a programmable nuclease may comprise a reducing agent at a concentration of from 0.1 mM to 10 mM. A buffer compatible with a programmable nuclease may comprise a reducing agent at a concentration of about 1 mM.

[0198] A buffer compatible with a programmable nuclease may comprise a competitor. Exemplary competitors compete with the target nucleic acid or the reporter nucleic acid for cleavage by the programmable nuclease. Exemplary competitors include heparin, and imidazole, and salmon sperm DNA. A buffer compatible with a programmable nuclease may comprise a competitor at a concentration of from 1 μg/mL to 100 μg/mL. A buffer compatible with a programmable nuclease may comprise a competitor at a concentration of from 40 μg/mL to 60 μg/mL.

[0199] In some embodiments, a programmable CasΦ nuclease is described as a “nickase” if the predominant cleavage product is a nicked nucleic acid when the target nucleic acid is a double-stranded nucleic acid. In some embodiments, a programmable CasΦ nuclease cleaves both strands of a double-stranded target nucleic acid. In some embodiments, the target nucleic acid is DNA. In some embodiments, the target nucleic acid is double-stranded DNA.

[0200] Where a programmable CasΦ nuclease disclosed herein cleaves both strands of a double-stranded target nucleic acid, the strand break may be a staggered cut with a 5′ overhang. In some embodiments, the 5′ overhang is an overhang of between 5 and 10 nucleotides. In some embodiments, the 5′ overhang is an overhang of 5 or 6 nucleotides. In some embodiments, the 5′ overhang is an overhang of 9 or 10 nucleotides.

[0201] In some embodiments, where the programmable CasΦ nuclease or a variant thereof comprises at least 70%, at least 75%, at least 80%, at least 85%, at least 90%, at least 92%, at least 95%, at least 97%, at least 99%, or 100% sequence identity with SEQ ID NO: 20, the 5′ overhang is a 9 or 10 nucleotide overhang. In preferred embodiments, where the programmable CasΦ nuclease or a variant thereof comprises at least 90% sequence identity with SEQ ID NO: 20, the 5′ overhang is a 9 or 10 nucleotide overhang. In further preferred embodiments, where the programmable CasΦ nuclease or a variant thereof comprises the amino acid sequence of SEQ ID NO: 20, the 5′ overhang is a 9 or 10 nucleotide overhang.

[0202] In some embodiments, where the programmable CasΦ nuclease or a variant thereof comprises at least 70%, at least 75%, at least 80%, at least 85%, at least 90%, at least 92%, at least 95%, at least 97%, at least 99%, or 100% sequence identity with SEQ ID NO: 22, the 5′ overhang is a 9 or 10 nucleotide overhang. In preferred embodiments, where the programmable CasΦ nuclease or a variant thereof comprises at least 90% sequence identity with SEQ ID NO: 22, the 5′ overhang is a 10 nucleotide overhang. In further preferred embodiments, where the programmable CasΦ nuclease or a variant thereof comprises the amino acid sequence of SEQ ID NO: 22, the 5′ overhang is a 10 nucleotide overhang.

[0203] In some embodiments, where the programmable CasΦ nuclease or a variant thereof comprises at least 70%, at least 75%, at least 80%, at least 85%, at least 90%, at least 92%, at least 95%, at least 97%, at least 99%, or 100% sequence identity with SEQ ID NO: 28, the 5′ overhang is a 9 nucleotide overhang. In preferred embodiments, where the programmable CasΦ nuclease or a variant thereof comprises at least 90% sequence identity with SEQ ID NO: 28, the 5′ overhang is a 9 nucleotide overhang. In further preferred embodiments, where the programmable CasΦ nuclease or a variant thereof comprises the amino acid sequence of SEQ ID NO: 28, the 5′ overhang is a 9 nucleotide overhang.

[0204] In some embodiments, where the programmable CasΦ nuclease or a variant thereof comprises at least 70%, at least 75%, at least 80%, at least 85%, at least 90%, at least 92%, at least 95%, at least 97%, at least 99%, or 100% sequence identity with SEQ ID NO: 40, the 5′ overhang is a 10 nucleotide overhang. In preferred embodiments, where the programmable CasΦ nuclease or a variant thereof comprises at least 90% sequence identity with SEQ ID NO: 40, the 5′ overhang is a 10 nucleotide overhang. In further embodiments, where the programmable CasΦ nuclease or a variant thereof comprises the amino acid sequence of SEQ ID NO: 40, the 5′ overhang is a 10 nucleotide overhang.

[0205] In some embodiments, where the programmable CasΦ nuclease or a variant thereof comprises at least 70%, at least 75%, at least 80%, at least 85%, at least 90%, at least 92%, at least 95%, at least 97%, at least 99%, or 100% sequence identity with SEQ ID NO: 37, the 5′ overhang is a 9 or 10 nucleotide overhang. In preferred embodiments, where the programmable CasΦ nuclease or a variant thereof comprises at least 90% sequence identity with SEQ ID NO: 37, the 5′ overhang is a 9 or 10 nucleotide overhang. In further preferred embodiments, where the programmable CasΦ nuclease or a variant thereof comprises the amino acid sequence of SEQ ID NO: 37, the 5′ overhang is a 9 or 10 nucleotide overhang.

[0206] In some embodiments, where the programmable CasΦ nuclease or a variant thereof comprises at least 70%, at least 75%, at least 80%, at least 85%, at least 90%, at least 92%, at least 95%, at least 97%, at least 99%, or 100% sequence identity with SEQ ID NO: 41, the 5′ overhang is a 9 or 10 nucleotide overhang. In preferred embodiments, where the programmable CasΦ nuclease or a variant thereof comprises at least 90% sequence identity with SEQ ID NO: 41, the 5′ overhang is a 9 or 10 nucleotide overhang. In further preferred embodiments, where the programmable CasΦ nuclease or a variant thereof comprises the amino acid sequence of SEQ ID NO: 41, the 5′ overhang is a 9 or 10 nucleotide overhang.

[0207] In some embodiments, where the programmable CasΦ nuclease or a variant thereof comprises at least 70%, at least 75%, at least 80%, at least 85%, at least 90%, at least 92%, at least 95%, at least 97%, at least 99%, or 100% sequence identity with SEQ ID NO: 12, the 5′ overhang is a 5 nucleotide overhang. In preferred embodiments, where the programmable CasΦ nuclease or a variant thereof comprises at least 90% sequence identity with SEQ ID NO: 12, the 5′ overhang is a 5 nucleotide overhang. In further preferred embodiments, where the programmable CasΦ nuclease or a variant thereof comprises the amino acid sequence of SEQ ID NO: 12, the 5′ overhang is a 5 nucleotide overhang.

[0208] In some embodiments, where the programmable CasΦ nuclease or a variant thereof comprises at least 70%, at least 75%, at least 80%, at least 85%, at least 90%, at least 92%, at least 95%, at least 97%, at least 99%, or 100% sequence identity with SEQ ID NO: 24, the 5′ overhang is a 6 nucleotide overhang. In preferred embodiments, where the programmable CasΦ nuclease or a variant thereof comprises at least 90% sequence identity with SEQ ID NO: 24, the 5′ overhang is a 6 nucleotide overhang. In further preferred embodiments, where the programmable CasΦ nuclease or a variant thereof comprises the amino acid sequence of SEQ ID NO: 24, the 5′ overhang is a 6 nucleotide overhang.

[0209] In some embodiments, where the programmable CasΦ nuclease or a variant thereof comprises at least 70%, at least 75%, at least 80%, at least 85%, at least 90%, at least 92%, at least 95%, at least 97%, at least 99%, or 100% sequence identity with SEQ ID NO: 25, the 5′ overhang is a 6 nucleotide overhang. In preferred embodiments, where the programmable CasΦ nuclease or a variant thereof comprises at least 90% sequence identity with SEQ ID NO: 25, the 5′ overhang is a 6 nucleotide overhang. In further preferred embodiments, where the programmable CasΦ nuclease or a variant thereof comprises the amino acid sequence of SEQ ID NO: 25, the 5′ overhang is a 6 nucleotide overhang.

[0210] In some embodiments, where the programmable CasΦ nuclease or a variant thereof comprises at least 70%, at least 75%, at least 80%, at least 85%, at least 90%, at least 92%, at least 95%, at least 97%, at least 99%, or 100% sequence identity with SEQ ID NO: 32, the 5′ overhang is a 6 nucleotide overhang. In preferred embodiments, where the programmable CasΦ nuclease or a variant thereof comprises at least 90% sequence identity with SEQ ID NO: 32, the 5′ overhang is a 6 nucleotide overhang. In further preferred embodiments, where the programmable CasΦ nuclease or a variant thereof comprises the amino acid sequence of SEQ ID NO: 32, the 5′ overhang is a 6 nucleotide overhang.

[0211] In some embodiments, where the programmable CasΦ nuclease or a variant thereof comprises at least 70%, at least 75%, at least 80%, at least 85%, at least 90%, at least 92%, at least 95%, at least 97%, at least 99%, or 100% sequence identity with SEQ ID NO: 33, the 5′ overhang is a 6 nucleotide overhang. In preferred embodiments, where the programmable CasΦ nuclease or a variant thereof comprises at least 90% sequence identity with SEQ ID NO: 33, the 5′ overhang is a 6 nucleotide overhang. In further preferred embodiments, where the programmable CasΦ nuclease or a variant thereof comprises the amino acid sequence of SEQ ID NO: 33, the 5′ overhang is a 6 nucleotide overhang.

[0212] In some embodiments, a programmable CasΦ nuclease rapidly cleaves a strand of a double-stranded target nucleic acid. In some embodiments, the programmable CasΦ nuclease cleaves the second strand of the target nucleic acid after it has cleaved the first strand of the target nucleic acid. The cleavage of target nucleic acid strands can be assessed in an in vitro cis-cleavage assay. To perform such as assay, the programmable CasΦ nuclease is complexed to its native crRNA, e.g. CasΦ.2 nuclease with the CasΦ.2 repeat, in buffer comprising 50 mM potassium acetate, 20 mM Tris-acetate, 10 mM magnesium acetate, 100 ug/ml BSA, and which is pH 7.9 at 25° C. The complexing is carried out for 20 minutes at room temperature, e.g. 20-22° C. The RNP is at a concentration of 200 nM. The target plasmid is a 2.2 kb super-coiled plasmid containing a target sequence, either 5′-TATTAAATACTCGTATTGCTGTTCGATTAT-3′ (SEQ ID NO: 116) or 5′-CACAGCTTGTCTGTAAGCGGATGCCATATG-3′ (SEQ ID NO: 117), which is immediately downstream of a 5′-GTTG-3′ or 5′-TTTG-3′ PAM. At time “0” 30 equal volumes of target plasmid, at 20 nM, and complexed RNP are mixed, so that the concentration of target plasmid is 10 nM and the concentration of complexed RNP is 100 nM. The incubation temperature is 37° C. The reaction is quenched at desired time points, e.g. 1, 3, 6, 15, 30 and 60 minutes, with reaction quench comprising 1 mg/ml proteinase K, 0.08% SDS and 15 mM EDTA. The sample incubates for 30 minutes at 37° C. to deproteinized. The cleavage is quantified by agarose gel analysis.

[0213] In some embodiments, a programmable CasΦ nuclease creates at least 50%, at least 55%, at least 60%, at least 65%, at least 70%, at least 75%, at least 80%, at least 85%, at least 90 or at least 95% of the maximum amount of nicked product within 1 minute, where the maximum amount of nicked product is the maximum amount detected within a 60 minute period from when the target plasmid is mixed with the programmable CasΦ nuclease. In preferred embodiments, at least 80% of the maximum amount of nicked product is created within 1 minute. In more preferred embodiments, at least 90% of the maximum amount of nicked product is created within 1 minute.

[0214] In some embodiments, a programmable CasΦ nuclease creates at least 50%, at least 55%, at least 60%, at least 65%, at least 70%, at least 75%, at least 80%, at least 85%, at least 90 or at least 95% of the maximum amount of linearized product is created within 1 minute, where the maximum amount of linearized product is the maximum amount detected within a 60 minute period from when the target plasmid is mixed with the programmable CasΦ nuclease. In preferred embodiments, at least 80% of the maximum amount of linearized product is created within 1 minute. In more preferred embodiments, at least 90% of the maximum amount of linearized product is created within 1 minute.

[0215] In some embodiments, a programmable CasΦ nuclease uses a co-factor. In some embodiments, the co-factor allows the programmable CasΦ nuclease to perform a function. In some embodiments, the function is pre-crRNA processing and/or target nucleic acid cleavage. As discussed in Jiang F. and Doudna J. A. (Annu. Rev. Biophys. 2017. 46:505-29), Cas9 uses divalent metal ions as co-factors. The suitability of a divalent metal ion as a cofactor can easily be assessed, such as by methods based on those described by Sundaresan et al. (Cell Rep. 2017 Dec. 26; 21 (13): 3728-3739). In some embodiments, the co-factor is a divalent metal ion. In some embodiments, the divalent metal ion is selected from Mg²⁺, Mn²⁺, Zn²⁺, Ca²⁺, Cu²⁺. In a preferred embodiment, the divalent metal ion is Mg²⁺. In some embodiments, a programmable CasΦ nuclease forms a complex with a divalent metal ion. In preferred embodiments, a programmable CasΦ nuclease forms a complex with Mg²⁺.

[0216] In some aspects, the disclosure provides a composition comprising a programmable CasΦ nuclease disclosed herein and a cell, preferably wherein the cell is a eukaryotic cell. In some embodiments, a programmable CasΦ nuclease disclosed herein is in a cell, preferably wherein the cell is a eukaryotic cell.

[0217] In some aspects, the disclosure provides a composition comprising a nucleic acid encoding a programmable CasΦ nuclease disclosed herein and a cell, preferably wherein the cell is a eukaryotic cell. In some embodiments, a nucleic acid encoding a programmable CasΦ nuclease disclosed herein is in a cell, preferably wherein the cell is a eukaryotic cell.

### Guide Nucleic Acids

[0218] The methods and compositions of the disclosure may comprise a guide nucleic acid. The guide nucleic acid can bind to a target nucleic acid (e.g., a single strand of a target nucleic acid) or portion thereof. For example, the guide nucleic acid can bind to a target nucleic acid such as nucleic acid from a virus or a bacterium or other agents responsible for a disease, or an amplicon thereof, as described herein. The guide nucleic acid can bind to a target nucleic acid such as a nucleic acid from a bacterium, a virus, a parasite, a protozoa, a fungus or other agents responsible for a disease, or an amplicon thereof, as described herein. The target nucleic acid can comprise a mutation, such as a single nucleotide polymorphism (SNP). A mutation can confer for example, resistance to a treatment, such as antibiotic treatment. A mutation can confer a gene malfunction or gene knockout. A mutation can confer a disease, contribution to a disease, or risk for a disease, such as a liver disease or disorder, eye disease or disorder, cystic fibrosis, or muscle disease or disorder. The guide nucleic acid can bind to a target nucleic acid such as a nucleic acid, preferably DNA, from a cancer gene or gene associated with a genetic disorder, or an amplicon thereof, as described herein. The guide nucleic acid comprises a segment of nucleic acids that are reverse complementary to the target nucleic acid. Often the guide nucleic acid binds specifically to the target nucleic acid. The target nucleic acid may be a reversed transcribed RNA, DNA, DNA amplicon, or synthetic nucleic acids. The target nucleic acid can be a single-stranded DNA or DNA amplicon of a nucleic acid of interest. A guide nucleic acid may be a non-naturally occurring guide nucleic acid. A non-naturally occurring guide nucleic acid may comprise an engineered sequence having a repeat and a spacer that hybridizes to a target nucleic acid sequence of interest. A non-naturally occurring guide nucleic acid may be recombinantly expressed or chemically synthesized.

[0219] A guide nucleic acid (e.g. gRNA) may hybridize to a target sequence of a target nucleic acid. The guide nucleic acid can bind to a programmable nuclease.

[0220] In some embodiments, a gRNA comprises a crRNA. In some embodiments, a gRNA of a CasΦ polypeptide or variants thereof does not comprise a tracrRNA. As described by Jiang F. and Doudna J. A. (Annu. Rev. Biophys. 2017. 46:505-29), Cas9 cleavage activity requires a tracrRNA. A tracrRNA is a polynucleotide that hybridizes with a crRNA to allow crRNA maturation such that the crRNA can bind to the Cas nuclease and locate the Cas nuclease to a target sequence. In some embodiments, a programmable CasΦ nuclease disclosed herein does not require a tracrRNA to locate and/or cleave a target nucleic acid. A crRNA may comprise a repeat region. Specifically, the crRNA of the guide nucleic acid may comprise a repeat region and a spacer region. The repeat region refers to the sequence of the crRNA that binds to the programmable nuclease. The spacer region refers to the sequence of the crRNA that hybridizes to a sequence of the target nucleic acid. In some embodiments, the repeat region may comprise mutations or truncations with respect to the repeat sequences in pre-crRNA. The repeat sequence of the crRNA may interact with a programmable nuclease, allowing for the guide nucleic acid and the programmable nuclease to form a complex. This complex may be referred to as a ribonucleoprotein (RNP) complex. The crRNA may comprise a spacer sequence. The spacer sequence may hybridize to a target sequence of the target nucleic acid, where the target sequence is a segment of a target nucleic acid. The spacer sequences may be reverse complementary to the target sequence. In some cases, the spacer sequence may be sufficiently reverse complementary to a target sequence to allow for hybridization, however, may not necessarily be 100% reverse complementary.

[0221] In some embodiments, a programmable nuclease may cleave a precursor RNA (“pre-crRNA”) to produce (or “process”) a guide RNA (gRNA), also referred to as a “mature guide RNA.” A programmable nuclease that cleaves pre-crRNA to produce a mature guide RNA is said to have pre-crRNA processing activity.

[0222] Programmable nucleases disclosed herein may process the repeat sequence of a crRNA, where the repeat sequence is the region of the crRNA that binds to the programmable nuclease. For example, crRNA may be delivered to a mammalian cell, e.g. a HEK293T cell, wherein the crRNA includes a full length repeat region which is 36 nucleotides in length, along with a programmable nuclease. The programmable nuclease then cleaves the repeat region of the crRNA so that the mature crRNA comprises a shorter repeat region (e.g. 24 nucleotides in length). Accordingly, in some embodiments, programmable nucleases disclosed herein are capable of cleaving the repeat region of a crRNA. In preferred embodiments, programmable nucleases disclosed herein are capable of cleaving the repeat region of a crRNA in mammalian cells.

[0223] The guide nucleic acid can bind specifically to the target nucleic acid. A guide nucleic acid can comprise a sequence that is, at least in part, reverse complementary to the sequence of a target nucleic acid.

[0224] The guide nucleic acid may be a non-naturally occurring guide nucleic acid. A non-naturally occurring guide nucleic acid may comprise an engineered sequence having a repeat and a spacer that hybridizes to a target nucleic acid sequence of interest. A non-naturally occurring guide nucleic acid may be recombinantly expressed or chemically synthesized.

[0225] A guide nucleic acid can comprise RNA, DNA, or a combination thereof. The term “gRNA” refers to a guide nucleic acid comprising RNA. A gRNA may include nucleosides that are not ribonucleic. In some embodiments, all nucleosides in a gRNA are ribonucleic. In some embodiments, some of the nucleosides in a gRNA are not ribonucleic. In embodiments where nucleosides in a gRNA are not ribonucleic, non-ribonucleic nucleosides may be naturally-occurring or non-naturally-occurring nucleosides. In some embodiments, inter-nucleoside links are phosphodiester bonds. In some embodiments, the inter-nucleoside link between at least two nucleosides in a guide nucleic acid is not a phosphodiester bond. In some embodiments, the inter-nucleoside link between at least two nucleosides is a non-natural inter-nucleoside linkage. Non-natural inter-nucleoside linkages include phosphorous and non-phosphorous inter-nucleoside linkages. Phosphorous inter-nucleoside linkages include phosphorothioate linkages and thiophosphate linkages. An inter-nucleoside linkage may comprise a “C3 spacer”. C3 spacers are known to the skilled person as comprising a chain of three carbon atoms.

[0226] Guide nucleic acids may be modified to improve genome editing efficiency, increase stability, reduce off-target effects, and/or increase the affinity of the guide nucleic acid for a CasΦ polypeptide disclosed herein. Modifications may include non-natural nucleotides and/or non-natural linkages. In addition or alternatively, one or more sugar moieties of the guide nucleic acid may be modified. Such sugar moiety modifications may include 2′-O-methyl (2′OMe,), 2′-O-methyoxy-ethyl and 2′ fluoro. In some embodiments, editing efficiency, or genome editing efficiency, is determined by analyzing the frequency of indel mutations in a nucleic acid or gene knockout. In some embodiments, the use of a flow cytometer or next generation sequencing may be used to analyze cells for indel mutations or gene knockout. In other embodiments, off-target effects may be detected using a flow cytometer, next generation sequencing, or CIRCLE-seq.

[0227] In some preferred embodiments, first 3 nucleosides (or one of the first 3 nucleosides, or a combination of the first 3 nucleosides) from the 5′ end of the repeat region comprise a 2′-O-methyl modification and the linkages between the 3 nucleosides at the 3′ end of the spacer region comprise phosphorothioate linkages.

[0228] In some embodiments, the first nucleoside at the 5′ end of the repeat region comprises a 2′-O-methyl modification. In some embodiments, the first two nucleosides at the 5′ end of the repeat region comprise 2′-O-methyl modifications. In some embodiments, the first three nucleosides at the 5′ end of the repeat region comprise 2′-O-methyl modifications. In some embodiments, the last nucleoside at the 3′ end of the spacer region comprises a 2′-O-methyl modification. In some embodiments, the last two nucleosides at the 3′ end of the spacer region comprise 2′-O-methyl modifications. In some embodiments, the last three nucleosides at the 3′ end of the spacer region comprise 2′-O-methyl modifications.

[0229] In some embodiments, the first 3 nucleosides (or one of the first 3 nucleosides, or a combination of the first 3 nucleosides) from the 5′ end of the repeat region and the 3 nucleosides at the 3′ end of the spacer region comprise a 2′-O-methyl modification, and the linkages between the 3 nucleosides at the 3′ end of the spacer region comprise phosphorothioate linkages.

[0230] In some embodiments, the first 3 nucleosides (or one of the first 3 nucleosides, or a combination of the first 3 nucleosides) from the 5′ end of the repeat region and the 3 nucleosides at the 3′ end of the spacer region comprise a 2′ fluoro modification.

[0231] In some embodiments, the first nucleoside at the 5′ end of the repeat region comprises a 2′ fluoro modification. In some embodiments, the first two nucleosides at the 5′ end of the repeat region comprise 2′ fluoro modifications. In some embodiments, the first three nucleosides at the 5′ end of the repeat region comprise 2′ fluoro modifications. In some embodiments, the last nucleoside at the 3′ end of the spacer region comprises a 2′ fluoro modification. In some embodiments, the last two nucleosides at the 3′ end of the spacer region comprise 2′ fluoro modifications. In some embodiments, the last three nucleosides at the 3′ end of the spacer region comprise 2′ fluoro modifications. In preferred embodiments, the last three nucleosides at the 3′ end of the spacer region comprise 2′ fluoro modifications.

[0232] In preferred embodiments, the first two nucleosides at the 5′ end of the repeat region comprise 2′-O-methyl modifications, the first two nucleosides at the 5′ end of the repeat are linked by a phosphorothioate linkage, and the last three nucleosides at the 3′ end of the spacer region comprise 2′ fluoro modifications.

[0233] In some embodiments, the linkage between the two nucleosides at the 5′ end of the repeat region comprises a 3C spacer and the linkage between the two nucleosides at the 3′ end of the spacer region comprises a 3C spacer.

[0234] In some embodiments, the guide nucleic acid comprises ribonucleic nucleosides and deoxyribonucleic nucleosides. In some embodiments, the guide nucleic acid is a guide RNA wherein the first, eighth and ninth nucleosides from the 5′ end of the spacer region and the four nucleosides at the 3′ end of the spacer region are deoxyribonucleic nucleosides.

[0235] In some embodiments, the guide nucleic acid comprises a poly A tail. In some preferred embodiments, the guide nucleic acid comprises a poly A tail at the 3′ end of the spacer region.

[0236] In some embodiments, a plurality of modified guides (e.g., a combination of modified guides disclosed herein) are complexed with one or more programmable nucleases (e.g., one or more programmable nucleases disclosed herein). In some examples, one or more of the plurality of modified guides comprise any of the nucleoside modifications described herein. In some examples, one or more of the plurality of the modified guides comprise any length of repeat or spacer region described herein. In some examples, one or more of the plurality of the modified guides comprise a repeat spacer length described herein, and a nucleoside modification described herein. In some embodiments, one or more of the plurality of modified guides comprise a repeat sequence from about 15 to about 20 nucleotides in length. In some embodiments, one or more of the plurality of modified guides comprise a spacer sequence or region from about 15 to about 20 nucleotides in length.

[0237] TABLE 2 provides illustrative crRNA sequences for use with the compositions and methods of the disclosure. In some embodiments, the crRNA sequence comprises at least 70%, at least 80%, at least 90%, at least 92%, at least 95%, at least 97%, or at least 99%, or 100% sequence identity to any one of SEQ ID NO: 48-SEQ ID NO: 86, or a reverse complement thereof. In some embodiments, the crRNA sequence comprises at least 70%, at least 80%, at least 90%, at least 92%, at least 95%, at least 97%, at least 99%, or 100% sequence identity to SEQ ID NO: 49 or a reverse complement thereof. In some embodiments, the crRNA sequence comprises at least 70%, at least 80%, at least 90%, at least 92%, at least 95%, at least 97%, at least 99%, or 100% sequence identity to SEQ ID NO: 51 or a reverse complement thereof. In some embodiments, the crRNA sequence comprises at least 70%, at least 80%, at least 90%, at least 92%, at least 95%, at least 97%, at least 99%, or 100% sequence identity to SEQ ID NO: 52 or a reverse complement thereof. In some embodiments, the crRNA sequence comprises at least 70%, at least 80%, at least 90%, at least 92%, at least 95%, at least 97%, at least 99%, or 100% sequence identity to SEQ ID NO: 54 or a reverse complement thereof. In some embodiments, the crRNA sequence comprises at least 70%, at least 80%, at least 90%, at least 92%, at least 95%, at least 97%, at least 99%, or 100% sequence identity to SEQ ID NO: 57 or a reverse complement thereof.

TABLE 2
Illustrative crRNA sequences

| | | SEQ |
|---|---|---|
| CasΦ | crRNA repeat sequence | ID. |
| ortholog | (shown as DNA), 5′-to-3′ | NO. |
| CasΦ.01 | GGAGAGATCTCAAACGATTGCTCGATTAGTCGAGAC | 48 |
| CasΦ.02 | GTCGGAACGCTCAACGATTGCCCCTCACGAGGGGAC | 49 |
| CasΦ.04 | ACCAAAACGACTATTGATTGCCCAGTACGCTGGGAC | 50 |
| CasΦ.07 | GGATCCAATCCTTTTTGATTGCCCAATTCGTTGG | 51 |
| | GAC | |
| CasΦ.10 | GGATCTGAGGATCATTATTGCTCGTTACGACGAGAC | 52 |
| CasΦ.11 | CCTGCGAAACCTTTTGATTGCTCAGTACGCTGAGAC | 53 |
| CasΦ.12 | CTTTCAAGACTAATAGATTGCTCCTTACGAGGAGAC | 54 |
| CasΦ.13 | GTAGAAGACCTCGCTGATTGCTCGGTGCGCCGAGAC | 55 |
| CasΦ.17 | ATGGCAACAGACTCTCATTGCGCGGTACGCCGCGAC | 56 |
| CasΦ.18 | ACCAAAACGACTATTGATTGCCCAGTACGCTGGGAC | 57 |
| CasΦ.19 | GTCGCTCTCTAACGCTTGCCCAGTACGCTGGGAC | 58 |
| CasΦ.20 | GCTGGAAGACTCAATGATGGCTCCTTACGAGGAGAC | 59 |
| CasΦ.21 | GGTTGAACCCTCAACAGATTGCTCGGTAAGCCGAG | 60 |
| | AC | |
| CasΦ.22 | GGTTGAACCCTCAACAGATTGCTCGGTAAGCCGAG | 61 |
| | AC | |
| CasΦ.23 | CTTGAAATCCTGTCAGATTGCTCCCTTCGGGGAGAC | 62 |
| CasΦ.24 | GCTGGAAGACTCAATGATGGCTCCTTACGAGGAGAC | 63 |
| CasΦ.25 | GCTGGAAGACTCAATGATGGCTCCTTACGAGGAGAC | 64 |
| CasΦ.26 | CTAGGAACGCACGCAGATTGCTCGGTACGCCGAGAC | 65 |
| CasΦ.27 | ATTGCAACGCCTAAAGATTGCTCGATACGTCGAGAC | 66 |
| CasΦ.28 | GTTCGGCRAYCCTTTGATTGCTCAGTACGCTGAGAC | 67 |
| CasΦ,29 | GTTGAACCTAGATCAGATGGCTCAGTACGCTGAGAC | 68 |
| CasΦ.30 | CCCTCAACACGTCAGAAATGCCCGGCACGCCGGGAC | 69 |
| CasΦ.31 | GTCGCAAGACTCGAATAATTGCCCCTCTATGGGGAC | 70 |
| CasΦ.32 | GCTGGGGACCGATCCTGATTGCTCGCTGCGGCGAGAC | 71 |
| CasΦ.33 | CTCTCAATGGATAACGATTGCTCTCTACGGAGAGAC | 72 |
| CasΦ.34 | GCTGGAAGACTCAATGATGGCTCCTTACGAGGAGAC | 73 |
| CasΦ.35 | GTTGAACCCTCAACAGATTGCTCGGTAAGCCGAGAC | 74 |
| CasΦ.36 | GTCGCAAGACTCGAATAATTGCCCCTCTATGGGGAC | 75 |
| CasΦ.37 | GTCGGAACGCTCAACGATTGCCCCTCACGAGGGGAC | 76 |
| CasΦ.38 | GTTGAACCTAGATCAGATGGCTCAGTACGCTGAGAC | 77 |
| CasΦ.39 | CTCTCAATGGATAACGATTGCTCTCTACGGAGAGAC | 78 |
| CasΦ.41 | ACTGAAACCACCAACGATTGCGCTCCTCGGAGCGAC | 79 |
| CasΦ.42 | ACCAAAACGACTATTGATTGCCCAGTACGCTGGGAC | 80 |
| CasΦ.43 | GTTGAACCTAGATCAGATGGCTCAGTACGCTGAGAC | 81 |
| CasΦ.44 | GTTGAACCCTCAACAGATTGCTCGGTAAGCCGAGAC | 82 |
| CasΦ.45 | GTTGAACCTAGATCAGATGGCTCAGTACGCTGAGAC | 83 |
| CasΦ.46 | GTCGGAACGCTCAACGATTGCCCCTCACGAGGGGAC | 84 |
| CasΦ.47 | GGTTGAACCCTCAACAGATTGCTCGGTAAGCCGAG | 85 |
| | AC | |
| CasΦ.48 | GGTTGAACCCTCAACAGATTGCTCGGTAAGCCGAG | 86 |
| | AC | |

[0238] In some embodiments, the programmable nuclease disclosed herein is used in conjunction with a specific crRNA sequence. In some embodiments, the crRNA sequence comprises at least 70%, at least 80%, at least 90%, at least 92%, at least 95%, at least 97%, at least 99%, or 100% sequence identity to any one of SEQ ID NO: 48-SEQ ID NO: 86, or a reverse complement thereof. In some embodiments, the crRNA sequence comprises at least 70%, at least 80%, at least 90%, at least 92%, at least 95%, at least 97%, at least 99%, or 100% sequence identity to SEQ ID NO: 49 or a reverse complement thereof. In some embodiments, the crRNA sequence comprises at least 70%, at least 80%, at least 90%, at least 92%, at least 95%, at least 97%, at least 99%, or 100% sequence identity to SEQ ID NO: 51 or a reverse complement thereof. In some embodiments, the crRNA sequence comprises at least 70%, at least 80%, at least 90%, at least 92%, at least 95%, at least 97%, at least 99%, or 100% sequence identity to SEQ ID NO: 52 or a reverse complement thereof. In some embodiments, the crRNA sequence comprises at least 70%, at least 80%, at least 90%, at least 92%, at least 95%, at least 97%, at least 99%, or 100% sequence identity to SEQ ID NO: 54 or a reverse complement thereof. In some embodiments, the crRNA sequence comprises at least 70%, at least 80%, at least 90%, at least 92%, at least 95%, at least 97%, at least 99%, or 100% sequence identity to SEQ ID NO: 57 or a reverse complement thereof.

[0239] In some embodiments, the activity of a programmable CasΦ nuclease can be supported by a crRNA comprising any of the crRNA repeat sequences recited in TABLE 2. In some embodiments, the activity of a programmable CasΦ nuclease can be supported by a crRNA comprising a crRNA repeat sequence comprising at least 70%, at least 80%, at least 90%, at least 92%, at least 95%, at least 97%, at least 99%, or 100% sequence identity to any one of SEQ ID NO: 48-SEQ ID NO: 86.

[0240] In some embodiments, the crRNA repeat sequence comprises a hairpin. In some embodiments, the hairpin is in the 3′ portion of the crRNA repeat sequence. The hairpin comprises a double-stranded stem portion and a single-stranded loop portion. In preferred embodiments, one stand of the stem portion comprises a CYC sequence and the other strand comprises a GRG sequence, wherein Y and R are complementary. In preferred embodiments, the crRNA repeat comprises a GAC sequence at the 3′ end. In more preferred embodiments, the G of the GAC sequence is in the stem portion of the hairpin. In some embodiments, each strand of the stem portion comprises 3, 4, 5, 6, 7, 8, 9 or 10 nucleotides. In preferred embodiments, each strand of the stem portion comprises 3, 4 or 5 nucleotides. In some embodiments, the loop portion comprises 2, 3, 4, 5, 6, 7, 8, 9, 10 or more nucleotides. In preferred embodiments, the loop portion comprises 2, 3, 4, 5 or 6 nucleotides. In most preferred embodiments, the loop portion comprises 4 nucleotides. In some embodiments, the nucleotides are naturally occurring nucleotides. In some embodiments, the nucleotides are synthetic nucleotides.

[0241] In some cases, the guide nucleic acid is not naturally occurring and made by artificial combination of otherwise separate segments of sequence. Often, the artificial combination is performed by chemical synthesis, by genetic engineering techniques, or by the artificial manipulation of isolated segments of nucleic acids. In some cases, the segment of a guide nucleic acid that comprises a sequence that is reverse complementary to the target nucleic acid is 20 nucleotides in length. A guide nucleic acid can have at least 10, 11, 12, 13, 14, 15, 16, 17, 18, 19, 20, 21, 22, 23, 24, 25, 26, 27, 28, 29, or 30 nucleotides reverse complementary to a target nucleic acid. In some cases, the guide nucleic acid can be 10, 11, 12, 13, 14, 15, 16, 17, 18, 19, 20, 21, 22, 23, 24, 25, 26, 27, 28, 29, or 30 nucleotides in length. For example, a guide nucleic acid may be at least 10 bases. In some embodiments, a guide nucleic acid may be from 10 to 50 bases. In some embodiments, a guide nucleic acid may be at least 25 bases. In some cases, the guide nucleic acid has from exactly or about 12 nucleotides (nt) to about 80 nt, from about 12 nt to about 50 nt, from about 12 nt to about 45 nt, from about 12 nt to about 40 nt, from about 12 nt to about 35 nt, from about 12 nt to about 30 nt, from about 12 nt to about 25 nt, from about 12 nt to about 20 nt, from about 12 nt to about 19 nt, from about 19 nt to about 20 nt, from about 19 nt to about 25 nt, from about 19 nt to about 30 nt, from about 19 nt to about 35 nt, from about 19 nt to about 40 nt, from about 19 nt to about 45 nt, from about 19 nt to about 50 nt, from about 19 nt to about 60 nt, from about 20 nt to about 25 nt, from about 20 nt to about 30 nt, from about 20 nt to about 35 nt, from about 20 nt to about 40 nt, from about 20 nt to about 45 nt, from about 20 nt to about 50 nt, or from about 20 nt to about 60 nt reverse complementary to a target nucleic acid. In some cases, the guide nucleic acid has from about 10 nt to about 60 nt, from about 20 nt to about 50 nt, or from about 30 nt to about 40 nt reverse complementary to a target nucleic acid. It is understood that the sequence of a guide nucleic acid need not be 100% reverse complementary to that of its target nucleic acid to be specifically hybridizable, hybridizable, or bind specifically. The guide nucleic acid can have a sequence comprising at least one uracil in a region from nucleic acid residue 5 to 20 that is reverse complementary to a modification variable region in the target nucleic acid. The guide nucleic acid, in some cases, has a sequence comprising at least one uracil in a region from nucleic acid residue 5 to 9, 10 to 14, or 15 to 20 that is reverse complementary to a modification variable region in the target nucleic acid. The guide nucleic acid can have a sequence comprising at least one uracil in a region from nucleic acid residue 5 to 20 that is reverse complementary to a methylation variable region in the target nucleic acid. The guide nucleic acid, in some cases, has a sequence comprising at least one uracil in a region from nucleic acid residue 5 to 9, 10 to 14, or 15 to 20 that is reverse complementary to a methylation variable region in the target nucleic acid. The guide nucleic acid can hybridize with a target nucleic acid.

[0242] In some instances, compositions comprise shorter versions of the guide nucleic acids disclosed herein. For instance, the guide nucleic acid sequence may consist of a portion of a guide nucleic acid disclosed herein. In some instances, shorter versions may provide enhanced activity relative to their longer versions. Examples of longer versions and shorter versions of guide RNA for CasΦ.12 are shown in Tables I, K, M, O, Q, S, U, and W, and Tables AB-AF, respectively, wherein the shorter versions are produced by removing sixteen nucleotides from the 5′ end of the long version and three nucleotides from the 3′ end of the long version. In some instances, the long version is a CasΦ.32 guide nucleic acid described in Tables J, L, N, P, R, T, V, X, and the short version is a guide nucleic acid without the sixteen nucleotides at the 5′ end of the long version and without the three nucleotides at the 3′ end of the long version.

[0243] The guide nucleic acid (e.g., a non-naturally occurring guide nucleic acid) can be selected from a group of guide nucleic acids that have been tiled against the nucleic acid sequence of a strain of an infection or genomic locus of interest. The guide nucleic acid can be selected from a group of guide nucleic acids that have been tiled against the nucleic acid sequence of a target nucleic acid, for example, a strain of HPV16 or HPV18. Often, guide nucleic acids that are tiled against the nucleic acid of a strain of an infection or genomic locus of interest can be pooled for use in a method described herein. Often, these guide nucleic acids are pooled for detecting a target nucleic acid in a single assay. The pooling of guide nucleic acids that are tiled against a single target nucleic acid can enhance the detection of the target nucleic using the methods described herein. The pooling of guide nucleic acids that are tiled against a single target nucleic acid can ensure broad coverage of the target nucleic acid within a single reaction using the methods described herein. The tiling, for example, is sequential along the target nucleic acid. Sometimes, the tiling is overlapping along the target nucleic acid. In some instances, the tiling comprises gaps between the tiled guide nucleic acids along the target nucleic acid. In some instances, the tiling of the guide nucleic acids is non-sequential. Often, a method for detecting a target nucleic acid comprises contacting a target nucleic acid to a pool of guide nucleic acids and a programmable nuclease or nickase as disclosed herein, wherein a guide nucleic acid sequence of the pool of guide nucleic acids has a sequence selected from a group of tiled guide nucleic acid that correspond to nucleic acid sequence of a target nucleic acid; and assaying for a signal produce by cleavage of at least some nucleic acids of a reporter of a population of nucleic acids of a reporter. Pooling of guide nucleic acids can ensure broad spectrum identification, or broad coverage, of a target species within a single reaction. This can be particularly helpful in diseases or indications, like sepsis, that may be caused by multiple organisms.

[0244] In some embodiments, the spacer sequence is between 10 and 35 nucleotides in length, between 10 and 30 nucleotides in length, between 15 and 30 nucleotides in length, between 10 and 25 nucleotides in length, between 15 and 25 nucleotides in length, between 17 and 30 nucleotides in length, between 17 and 25 nucleotides in length, between 17 and 22 nucleotides in length, or between 17 and 20 nucleotides in length. In preferred embodiments, the spacer sequence between 17 and 25 nucleotides in length. In more preferred embodiments, the spacer sequence is between 17 and 20 nucleotides in length. In most preferred embodiments, the spacer sequence is 17 nucleotides in length.

[0245] In some embodiments, the repeat sequence is between 15 and 40 nucleotides in length, between 15 and 36 nucleotides in length, between 18 and 36 nucleotides in length, between 18 and 30 nucleotides in length, between 18 and 25 nucleotides in length, between 18 and 22 nucleotides in length, between 18 and 20 nucleotides in length. In preferred embodiments, the repeat sequence is between 20 and 22 nucleotides in length. In more preferred embodiments, the repeat sequence is 20 nucleotides in length.

[0246] The spacer region of guide nucleic acids for CasΦ polypeptides disclosed herein comprise a seed region. In some embodiments, the seed regions do not tolerate mismatches in the complentarity of a spacer and a target sequence within about 1 to about 20 nucleotides from the 5′ end of a spacer sequence. The seed region starts from the 5′ end of the spacer sequence and is a region in which mismatches in the complementarity between the spacer sequence and the target sequence are not tolerated when the guide nucleic acid is bound to a CasΦ polypeptide such that the guide nucleic acid does not hybridize to the target sequence to allow cleavage of the target nucleic acid by the CasΦ polypeptide. In some embodiments, the seed region comprises between 10 and 20 nucleosides, between 12 and 20 nucleosides, between 14 and 20 nucleosides, between 14 and 18 nucleosides, between 10 and 16 nucleosides, between 12 and 16 nucleosides, or between 14 and 16 nucleosides. In preferred embodiments, the seed region comprises 16 nucleotides.

[0247] A programmable nuclease of the present disclosure may be activated to exhibit cleavage activity (e.g., cis-cleavage of a target nucleic acid or trans-cleavage of a collateral nucleic acid) upon binding of a ribonucleoprotein (RNP) complex to a target nucleic acid, in which the spacer of the crRNA of the gRNA hybridizes to the target nucleic acid.

TABLE A
spacer sequences of gRNAs targeting
human TRAC in T cells

| | Spacer sequence | | SEQ |
|---|---|---|---|
| | (5′ --> 3′), | | ID. |
| Name | shown as DNA | Target | NO. |
| R3040 | TGGATATCTGTGGGACAAGA | TRAC | 118 |
| R3041 | TCCCACAGATATCCAGAACC | TRAC | 119 |
| R3042 | GAGTCTCTCAGCTGGTACAC | TRAC | 120 |
| R3043 | AGAGTCTCTCAGCTGGTACA | TRAC | 121 |
| R3044 | TCACTGGATTTAGAGTCTCT | TRAC | 122 |
| R3045 | AGAATCAAAATCGGTGAATA | TRAC | 123 |
| R3046 | GAGAATCAAAATCGGTGAAT | TRAC | 124 |
| R3047 | ACCGATTTTGATTCTCAAAC | TRAC | 125 |
| R3048 | TTTGAGAATCAAAATCGGTG | TRAC | 126 |
| R3049 | GTTTGAGAATCAAAATCGGT | TRAC | 127 |
| R3050 | TGATTCTCAAACAAATGTGT | TRAC | 128 |
| R3051 | GATTCTCAAACAAATGTGTC | TRAC | 129 |
| R3052 | ATTCTCAAACAAATGTGTCA | TRAC | 130 |
| R3053 | TGACACATTTGTTTGAGAAT | TRAC | 131 |
| R3054 | TCAAACAAATGTGTCACAAA | TRAC | 132 |
| R3055 | GTGACACATTTGTTTGAGAA | TRAC | 133 |
| R3056 | CTTTGTGACACATTTGTTTG | TRAC | 134 |
| R3057 | TGATGTGTATATCACAGACA | TRAC | 135 |
| R3058 | TCTGTGATATACACATCAGA | TRAC | 136 |
| R3059 | GTCTGTGATATACACATCAG | TRAC | 137 |
| R3060 | TGTCTGTGATATACACATCA | TRAC | 138 |
| R3061 | AAGTCCATAGACCTCATGTC | TRAC | 139 |
| R3062 | CTCTTGAAGTCCATAGACCT | TRAC | 140 |
| R3063 | AAGAGCAACAGTGCTGTGGC | TRAC | 141 |
| R3064 | CTCCAGGCCACAGCACTGTT | TRAC | 142 |
| R3065 | TTGCTCCAGGCCACAGCACT | TRAC | 143 |
| R3066 | GTTGCTCCAGGCCACAGCAC | TRAC | 144 |
| R3067 | CACATGCAAAGTCAGATTTG | TRAC | 145 |
| R3068 | GCACATGCAAAGTCAGATTT | TRAC | 146 |
| R3069 | GCATGTGCAAACGCCTTCAA | TRAC | 147 |
| R3070 | AAGGCGTTTGCACATGCAAA | TRAC | 148 |
| R3071 | CATGTGCAAACGCCTTCAAC | TRAC | 149 |
| R3072 | TTGAAGGCGTTTGCACATGC | TRAC | 150 |
| R3073 | AACAACAGCATTATTCCAGA | TRAC | 151 |
| R3074 | TGGAATAATGCTGTTGTTGA | TRAC | 152 |
| R3075 | TTCCAGAAGACACCTTCTTC | TRAC | 153 |
| R3076 | CAGAAGACACCTTCTTCCCC | TRAC | 154 |
| R3077 | CCTGGGCTGGGGAAGAAGGT | TRAC | 155 |
| R3078 | TTCCCCAGCCCAGGTAAGGG | TRAC | 156 |
| R3079 | CCCAGCCCAGGTAAGGGCAG | TRAC | 157 |
| R3080 | TAAAAGGAAAAACAGACATT | TRAC | 158 |
| R3081 | CTAAAAGGAAAAACAGACAT | TRAC | 159 |
| R3082 | TTCCTTTTAGAAAGTTCCTG | TRAC | 160 |
| R3083 | TCCTTTTAGAAAGTTCCTGT | TRAC | 161 |
| R3084 | CCTTTTAGAAAGTTCCTGTG | TRAC | 162 |
| R3085 | CTTTTAGAAAGTTCCTGTGA | TRAC | 163 |
| R3086 | TAGAAAGTTCCTGTGATGTC | TRAC | 164 |
| R3136 | AGAAAGTTCCTGTGATGTCA | TRAC | 165 |
| R3137 | GAAAGTTCCTGTGATGTCAA | TRAC | 166 |
| R3138 | ACATCACAGGAACTTTCTAA | TRAC | 167 |
| R3139 | CTGTGATGTCAAGCTGGTCG | TRAC | 168 |
| R3140 | TCGACCAGCTTGACATCACA | TRAC | 169 |
| R3141 | CTCGACCAGCTTGACATCAC | TRAC | 170 |
| R3142 | TCTCGACCAGCTTGACATCA | TRAC | 171 |
| R3143 | AAAGCTTTTCTCGACCAGCT | TRAC | 172 |
| R3144 | CAAAGCTTTTCTCGACCAGC | TRAC | 173 |
| R3145 | CCTGTTTCAAAGCTTTTCTC | TRAC | 174 |
| R3146 | GAAACAGGTAAGACAGGGGT | TRAC | 175 |
| R3147 | AAACAGGTAAGACAGGGGTC | TRAC | 176 |

TABLE B
spacer sequences of gRNAs targeting
human B2M in T cells

| | Spacer Sequence | | SEQ |
|---|---|---|---|
| | (5′ --> 3′), | | ID. |
| Name | shown as DNA | Target | NO. |
| R3087 | AATATAAGTGGAGGCGTCGC | B2M | 177 |
| R3088 | ATATAAGTGGAGGCGTCGCG | B2M | 178 |
| R3089 | AGGAATGCCCGCCAGCGCGA | B2M | 179 |
| R3090 | CTGAAGCTGACAGCATTCGG | B2M | 180 |
| R3091 | GGGCCGAGATGTCTCGCTCC | B2M | 181 |
| R3092 | GCTGTGCTCGCGCTACTCTC | B2M | 182 |
| R3093 | CTGGCCTGGAGGCTATCCAG | B2M | 183 |
| R3094 | TGGCCTGGAGGCTATCCAGC | B2M | 184 |
| R3095 | ATGTGTCTTTTCCCGATATT | B2M | 185 |
| R3096 | TCCCGATATTCCTCAGGTAC | B2M | 186 |
| R3097 | CCCGATATTCCTCAGGTACT | B2M | 187 |
| R3098 | CCGATATTCCTCAGGTACTC | B2M | 188 |
| R3099 | GAGTACCTGAGGAATATCGG | B2M | 189 |
| R3100 | GGAGTACCTGAGGAATATCG | B2M | 190 |
| R3101 | CTCAGGTACTCCAAAGATTC | B2M | 191 |
| R3102 | AGGTTTACTCACGTCATCCA | B2M | 192 |
| R3103 | ACTCACGTCATCCAGCAGAG | B2M | 193 |
| R3104 | CTCACGTCATCCAGCAGAGA | B2M | 194 |
| R3105 | TCTGCTGGATGACGTGAGTA | B2M | 195 |
| R3106 | CATTCTCTGCTGGATGACGT | B2M | 196 |
| R3107 | CCATTCTCTGCTGGATGACG | B2M | 197 |
| R3108 | ACTTTCCATTCTCTGCTGGA | B2M | 198 |
| R3109 | GACTTTCCATTCTCTGCTGG | B2M | 199 |
| R3110 | AGGAAATTTGACTTTCCATT | B2M | 200 |
| R3111 | CCTGAATTGCTATGTGTCTG | B2M | 201 |
| R3112 | CTGAATTGCTATGTGTCTGG | B2M | 202 |
| R3113 | CTATGTGTCTGGGTTTCATC | B2M | 203 |
| R3114 | AATGTCGGATGGATGAAACC | B2M | 204 |
| R3115 | CATCCATCCGACATTGAAGT | B2M | 205 |
| R3116 | ATCCATCCGACATTGAAGTT | B2M | 206 |
| R3117 | AGTAAGTCAACTTCAATGTC | B2M | 207 |
| R3118 | TTCAGTAAGTCAACTTCAAT | B2M | 208 |
| R3119 | AAGTTGACTTACTGAAGAAT | B2M | 209 |
| R3120 | ACTTACTGAAGAATGGAGAG | B2M | 210 |
| R3121 | TCTCTCCATTCTTCAGTAAG | B2M | 211 |
| R3122 | CTGAAGAATGGAGAGAGAAT | B2M | 212 |
| R3123 | AATTCTCTCTCCATTCTTCA | B2M | 213 |
| R3124 | CAATTCTCTCTCCATTCTTC | B2M | 214 |
| R3125 | TCAATTCTCTCTCCATTCTT | B2M | 215 |
| R3126 | TTCAATTCTCTCTCCATTCT | B2M | 216 |
| R3127 | AAAAAGTGGAGCATTCAGAC | B2M | 217 |
| R3128 | CTGAAAGACAAGTCTGAATG | B2M | 218 |
| R3129 | AGACTTGTCTTTCAGCAAGG | B2M | 219 |
| R3130 | TCTTTCAGCAAGGACTGGTC | B2M | 220 |
| R3131 | CAGCAAGGACTGGTCTTTCT | B2M | 221 |
| R3132 | AGCAAGGACTGGTCTTTCTA | B2M | 222 |
| R3133 | CTATCTCTTGTACTACACTG | B2M | 223 |
| R3134 | TATCTCTTGTACTACACTGA | B2M | 224 |
| R3135 | AGTGTAGTACAAGAGATAGA | B2M | 225 |
| R3148 | TACTACACTGAATTCACCCC | B2M | 226 |
| R3149 | AGTGGGGGTGAATTCAGTGT | B2M | 227 |
| R3150 | CAGTGGGGGTGAATTCAGTG | B2M | 228 |
| R3151 | TCAGTGGGGGTGAATTCAGT | B2M | 229 |
| R3152 | TTCAGTGGGGGTGAATTCAG | B2M | 230 |
| R3153 | ACCCCCACTGAAAAAGATGA | B2M | 231 |
| R3154 | ACACGGCAGGCATACTCATC | B2M | 232 |
| R3155 | GGCTGTGACAAAGTCACATG | B2M | 233 |
| R3156 | GTCACAGCCCAAGATAGTTA | B2M | 234 |
| R3157 | TCACAGCCCAAGATAGTTAA | B2M | 235 |
| R3158 | ACTATCTTGGGCTGTGACAA | B2M | 236 |
| R3159 | CCCCACTTAACTATCTTGGG | B2M | 237 |

TABLE C
spacer sequences of gRNAs that
target human PD1 in T cells

| | | | SEQ |
|---|---|---|---|
| | Spacer sequence | | ID. |
| Name | (5′ --> 3′) | Target | NO. |
| R2921 | CCUUCCGCUCACCUCCGCCU | PD1 | 238 |
| R2922 | CCUUCCGCUCACCUCCGCCU | PD1 | 239 |
| R2923 | CGCUCACCUCCGCCUGAGCA | PD1 | 240 |
| R2924 | UCCACUGCUCAGGCGGAGGU | PD1 | 241 |
| R2925 | UAGCACCGCCCAGACGACUG | PD1 | 242 |
| R2926 | AGGCAUGCAGAUCCCACAGG | PD1 | 243 |
| R2927 | CACAGGCGCCCUGGCCAGUC | PD1 | 244 |
| R2928 | UCUGGGCGGUGCUACAACUG | PD1 | 245 |
| R2929 | GCAUGCCUGGAGCAGCCCCA | PD1 | 246 |
| R2930 | UAGCACCGCCCAGACGACUG | PD1 | 247 |
| R2931 | UGGCCGCCAGCCCAGUUGUA | PD1 | 248 |
| R2932 | CUUCCGCUCACCUCCGCCUG | PD1 | 249 |
| R2933 | CAGGGCCUGUCUGGGGAGUC | PD1 | 250 |
| R2934 | UCCCCAGCCCUGCUCGUGGU | PD1 | 251 |
| R2935 | GGUCACCACGAGCAGGGCUG | PD1 | 252 |
| R2936 | UCCCCUUCGGUCACCACGAG | PD1 | 253 |
| R2937 | GAGAAGCUGCAGGUGAAGGU | PD1 | 254 |
| R2938 | ACCUGCAGCUUCUCCAACAC | PD1 | 255 |
| R2939 | UCCAACACAUCGGAGAGCUU | PD1 | 256 |
| R2940 | GCACGAAGCUCUCCGAUGUG | PD1 | 257 |
| R2941 | AGCACGAAGCUCUCCGAUGU | PD1 | 258 |
| R2942 | GUGCUAAACUGGUACCGCAU | PD1 | 259 |
| R2943 | CUGGGGCUCAUGCGGUACCA | PD1 | 260 |
| R2944 | UCCGUCUGGUUGCUGGGGCU | PD1 | 261 |
| R2945 | CCCGAGGACCGCAGCCAGCC | PD1 | 262 |
| R2946 | UGUGACACGGAAGCGGCAGU | PD1 | 263 |
| R2947 | CGUGUCACACAACUGCCCAA | PD1 | 264 |
| R2948 | GGCAGUUGUGUGACACGGAA | PD1 | 265 |
| R2949 | CACAUGAGCGUGGUCAGGGC | PD1 | 266 |
| R2950 | CGCCGGGCCCUGACCACGCU | PD1 | 267 |
| R2951 | GGGGCCAGGGAGAUGGCCCC | PD1 | 268 |
| R2952 | AUCUGCGCCUUGGGGGCCAG | PD1 | 269 |
| R2953 | GAUCUGCGCCUUGGGGGCCA | PD1 | 270 |
| R2954 | CCAGACAGGCCCUGGAACCC | PD1 | 271 |
| R2955 | CCAGCCCUGCUCGUGGUGAC | PD1 | 272 |
| R2956 | UCUCUGGAAGGGCACAAAGG | PD1 | 273 |
| R2957 | GUGCCCUUCCAGAGAGAAGG | PD1 | 274 |
| R2958 | UGCCCUUCCAGAGAGAAGGG | PD1 | 275 |
| R2959 | UGCCCUUCUCUCUGGAAGGG | PD1 | 276 |
| R2960 | CAGAGAGAAGGGCAGAAGUG | PD1 | 277 |
| R2961 | GAACUGGCCGGCUGGCCUGG | PD1 | 278 |
| R2962 | GGAACUGGCCGGCUGGCCUG | PD1 | 279 |
| R2963 | CAAACCCUGGUGGUUGGUGU | PD1 | 280 |
| R2964 | GUGUCGUGGGCGGCCUGCUG | PD1 | 281 |
| R2965 | CCUCGUGCGGCCCGGGAGCA | PD1 | 282 |
| R2966 | UCCCUGCAGAGAAACACACU | PD1 | 283 |
| R2967 | CUCUGCAGGGACAAUAGGAG | PD1 | 284 |
| R2968 | UCUGCAGGGACAAUAGGAGC | PD1 | 285 |
| R2969 | CUCCUCAAAGAAGGAGGACC | PD1 | 286 |
| R2970 | UCCUCAAAGAAGGAGGACCC | PD1 | 287 |
| R2971 | UCUGUGGACUAUGGGGAGCU | PD1 | 288 |
| R2972 | UCUCGCCACUGGAAAUCCAG | PD1 | 289 |
| R2973 | CCAGUGGCGAGAGAAGACCC | PD1 | 290 |
| R2974 | CAGUGGCGAGAGAAGACCCC | PD1 | 291 |
| R2975 | CGCUAGGAAAGACAAUGGUG | PD1 | 292 |
| R2976 | UCUUUCCUAGCGGAAUGGGC | PD1 | 293 |
| R2977 | CCUAGCGGAAUGGGCACCUC | PD1 | 294 |
| R2978 | CUAGCGGAAUGGGCACCUCA | PD1 | 295 |
| R2979 | GCCCCUCUGACCGGCUUCCU | PD1 | 296 |
| R2980 | CUUGGCCACCAGUGUUCUGC | PD1 | 297 |
| R2981 | GCCACCAGUGUUCUGCAGAC | PD1 | 298 |
| R2982 | UGCAGACCCUCCACCAUGAG | PD1 | 299 |
| R2983 | UCCUGAGGAAAUGCGCUGAC | PD1 | 300 |
| R2984 | CCUCAGGAGAAGCAGGCAGG | PD1 | 301 |
| R2985 | CUCAGGAGAAGCAGGCAGGG | PD1 | 302 |
| R2986 | CAGGCCGUCCAGGGGCUGAG | PD1 | 303 |
| R2987 | AGACAUGAGUCCUGUGGUGG | PD1 | 304 |
| R2988 | AGGUCCUGCCAGCACAGAGC | PD1 | 305 |
| R2989 | AGGGAGCUGGACGCAGGCAG | PD1 | 306 |
| R2990 | AGCCCCGGGCCGCAGGCAGC | PD1 | 307 |
| R2991 | AGGCAGGAGGCUCCGGGGCG | PD1 | 308 |
| R2992 | GGGGCUGGUUGGAGAUGGCC | PD1 | 309 |
| R2993 | GAGAUGGCCUUGGAGCAGCC | PD1 | 310 |
| R2994 | GCUGCUCCAAGGCCAUCUCC | PD1 | 311 |
| R2995 | GAGCAGCCAAGGUGCCCCUG | PD1 | 312 |
| R2996 | GGGAUGCCACUGCCAGGGGC | PD1 | 313 |
| R2997 | CGGGAUGCCACUGCCAGGGG | PD1 | 314 |
| R2998 | GGCCCUGCGUCCAGGGCGUU | PD1 | 315 |
| R2999 | UCUGCUCCCUGCAGGCCUAG | PD1 | 316 |
| R3000 | UCUAGGCCUGCAGGGAGCAG | PD1 | 317 |
| R3001 | CCUGAAACUUCUCUAGGCCU | PD1 | 318 |
| R3002 | UGACCUUCCCUGAAACUUCU | PD1 | 319 |
| R3003 | CAGGGAAGGUCAGAAGAGCU | PD1 | 320 |
| R3004 | AGGGAAGGUCAGAAGAGCUC | PD1 | 321 |
| R3005 | CUGCCCUGCCCACCACAGCC | PD1 | 322 |
| R3006 | CCUGCCCUGCCCACCACAGC | PD1 | 323 |
| R3007 | ACACAUGCCCAGGCAGCACC | PD1 | 324 |
| R3008 | CACAUGCCCAGGCAGCACCU | PD1 | 325 |
| R3009 | CCUGCCCCACAAAGGGCCUG | PD1 | 326 |
| R3010 | GUGGGGCAGGGAAGCUGAGG | PD1 | 327 |
| R3011 | UGGGGCAGGGAAGCUGAGGC | PD1 | 328 |
| R3012 | CUGCCUCAGCUUCCCUGCCC | PD1 | 329 |
| R3013 | CAGGCCCAGCCAGCACUCUG | PD1 | 330 |
| R3014 | AGGCCCAGCCAGCACUCUGG | PD1 | 331 |
| R3015 | CACCCCAGCCCCUCACACCA | PD1 | 332 |
| R3016 | GGACCGUAGGAUGUCCCUCU | PD1 | 333 |

TABLE D
spacer sequences of gRNAs targeting
human CIITA

| | Spacer sequence | | SEQ |
|---|---|---|---|
| | (5′ --> 3′), | | ID. |
| Name | shown as DNA | Target | NO. |
| R4503 | CTACACAATGCGTTGCCTGG | CIITA | 334 |
| C2TA_T1.1 | | | |
| R4504 | GGGCTCTGACAGGTAGGACC | CIITA | 335 |
| C2TA_T1.2 | | | |
| R4505 | TGTAGGAATCCCAGCCAGGC | CIITA | 336 |
| C2TA_T1.3 | | | |
| R4506 | CCTGGCTCCACGCCCTGCTG | CIITA | 337 |
| C2TA_T1.8 | | | |
| R4507 | GGGAAGCTGAGGGCACGAGG | CIITA | 338 |
| C2TA_T1.9 | | | |
| R4508 | ACAGCGATGCTGACCCCCTG | CIITA | 339 |
| C2TA_T2.1 | | | |
| R4509 | TTAACAGCGATGCTGACCCC | CIITA | 340 |
| C2TA_T2.2 | | | |
| R4510 | TATGACCAGATGGACCTGGC | CIITA | 341 |
| C2TA_T2.3 | | | |
| R4511 | GGGCCCCTAGAAGGTGGCTA | CIITA | 342 |
| C2TA_T2.4 | | | |
| R4512 | TAGGGGCCCCAACTCCATGG | CIITA | 343 |
| C2TA_T2.5 | | | |
| R4513 | AGAAGCTCCAGGTAGCCACC | CIITA | 344 |
| C2TA_T2.6 | | | |
| R4514 | TCCAGCCAGGTCCATCTGGT | CIITA | 345 |
| C2TA_T2.7 | | | |
| R4515 | TTCTCCAGCCAGGTCCATCT | CIITA | 346 |
| C2TA_T2.8 | | | |
| R5200 | AGCAGGCTGTTGTGTGACAT | CIITA | 1934 |
| R5201 | CATGTCACACAACAGCCTGC | CIITA | 1935 |
| R5202 | TGTGACATGGAAGGTGATGA | CIITA | 1936 |
| R5203 | ATCACCTTCCATGTCACACA | CIITA | 1937 |
| R5204 | GCATAAGCCTCCCTGGTCTC | CIITA | 1938 |
| R5205 | CAGGACTCCCAGCTGGAGGG | CIITA | 1939 |
| R5206 | CTCAGGCCCTCCAGCTGGGA | CIITA | 1940 |
| R5207 | TGCTGGCATCTCCATACTCT | CIITA | 1941 |
| R5208 | TGCCCAACTTCTGCTGGCAT | CIITA | 1942 |
| R5209 | CTGCCCAACTTCTGCTGGCA | CIITA | 1943 |
| R5210 | TCTGCCCAACTTCTGCTGGC | CIITA | 1944 |
| R5211 | TGACTTTTCTGCCCAACTTC | CIITA | 1945 |
| R5212 | CTGACTTTTCTGCCCAACTT | CIITA | 1946 |
| R5213 | TCTGACTTTTCTGCCCAACT | CIITA | 1947 |
| R5214 | CCAGAGGAGCTTCCGGCAGA | CIITA | 1948 |
| R5215 | AGGTCTGCCGGAAGCTCCTC | CIITA | 1949 |
| R5216 | CGGCAGACCTGAAGCACTGG | CIITA | 1950 |
| R5217 | CAGTGCTTCAGGTCTGCCGG | CIITA | 1951 |
| R5218 | AACAGCGCAGGCAGTGGCAG | CIITA | 1952 |
| R5219 | AACCAGGAGCCAGCCTCCGG | CIITA | 1953 |
| R5220 | TCCAGGCGCATCTGGCCGGA | CIITA | 1954 |
| R5221 | CTCCAGGCGCATCTGGCCGG | CIITA | 1955 |
| R5222 | TCTCCAGGCGCATCTGGCCG | CIITA | 1956 |
| R5223 | CTCCAGTTCCTCGTTGAGCT | CIITA | 1957 |
| R5224 | TCCAGTTCCTCGTTGAGCTG | CIITA | 1958 |
| R5225 | AGGCAGCTCAACGAGGAACT | CIITA | 1959 |
| R5226 | CTCGTTGAGCTGCCTGAATC | CIITA | 1960 |
| R5227 | AGCTGCCTGAATCTCCCTGA | CIITA | 1961 |
| R5228 | GTCCCCACCATCTCCACTCT | CIITA | 1962 |
| R5229 | TCCCCACCATCTCCACTCTG | CIITA | 1963 |
| R5230 | CCAGAGCCCATGGGGCAGAG | CIITA | 1964 |
| R5231 | GCCAGAGCCCATGGGGCAGA | CIITA | 1965 |
| R5232 | CAGCCTCAGAGATTTGCCAG | CIITA | 1966 |
| R5233 | GGAGGCCGTGGACAGTGAAT | CIITA | 1967 |
| R5234 | ACTGTCCACGGCCTCCCAAC | CIITA | 1968 |
| R5235 | GCTCCATCAGCCACTGACCT | CIITA | 1969 |
| R5236 | AGGCATGCTGGGCAGGTCAG | CIITA | 1970 |
| R5237 | CTCGGGAGGTCAGGGCAGGT | CIITA | 1971 |
| R5238 | GCTCGGGAGGTCAGGGCAGG | CIITA | 1972 |
| R5239 | GAGACCTCTCCAGCTGCCGG | CIITA | 1973 |
| R5240 | TTGGAGACCTCTCCAGCTGC | CIITA | 1974 |
| R5241 | GAAGCTTGTTGGAGACCTCT | CIITA | 1975 |
| R5242 | GGAAGCTTGTTGGAGACCTC | CIITA | 1976 |
| R5243 | TGGAAGCTTGTTGGAGACCT | CIITA | 1977 |
| R5244 | TACCGCTCACTGCAGGACAC | CIITA | 1978 |
| R5245 | CTGCTGCTCCTCTCCAGCCT | CIITA | 1979 |
| R5246 | CCGCTCCAGGCTCTTGCTGC | CIITA | 1980 |
| R5247 | TGCCCAGTCCGGGGTGGCCA | CIITA | 1981 |
| R5248 | GGCCAGCTGCCGTTCTGCCC | CIITA | 1982 |
| R5249 | GCAGCCAACAGCACCTCAGC | CIITA | 1983 |
| R5250 | GCTGCCAAGGAGCACCGGCG | CIITA | 1984 |
| R5251 | CCCAGCACAGCAATCACTCG | CIITA | 1985 |
| R5252 | GCCCAGCACAGCAATCACTC | CIITA | 1986 |
| R5253 | CTGTGCTGGGCAAAGCTGGT | CIITA | 1987 |
| R5254 | CCCTGACCAGCTTTGCCCAG | CIITA | 1988 |
| R5255 | GGCTGGGGCAGTGAGCCGGG | CIITA | 1989 |
| R5256 | TGGCCGGCTTCCCCAGTACG | CIITA | 1990 |
| R5257 | CCCAGTACGACTTTGTCTTC | CIITA | 1991 |
| R5258 | GTCTTCTCTGTCCCCTGCCA | CIITA | 1992 |
| R5259 | TCTTCTCTGTCCCCTGCCAT | CIITA | 1993 |
| R5260 | TCTGTCCCCTGCCATTGCTT | CIITA | 1994 |
| R5261 | AAGCAATGGCAGGGGACAGA | CIITA | 1995 |
| R5262 | CTTGAACCGTCCGGGGGATG | CIITA | 1996 |
| R5263 | AACCGTCCGGGGGATGCCTA | CIITA | 1997 |
| R5264 | TCCCTGGGCCCACAGCCACT | CIITA | 1998 |
| R5265 | AAGATGTGGCTGAAAACCTC | CIITA | 1999 |
| R5266 | TCAGCCACATCTTGAAGAGA | CIITA | 2000 |
| R5267 | CAGCCACATCTTGAAGAGAC | CIITA | 2001 |
| R5268 | AGCCACATCTTGAAGAGACC | CIITA | 2002 |
| R5269 | AAGAGACCTGACCGCGTTCT | CIITA | 2003 |
| R5270 | TGCTCATCCTAGACGGCTTC | CIITA | 2004 |
| R5271 | CAGCTCCTCGAAGCCGTCTA | CIITA | 2005 |
| R5272 | CGCTTCCAGCTCCTCGAAGC | CIITA | 2006 |
| R5273 | GAGGAGCTGGAAGCGCAAGA | CIITA | 2007 |
| R5274 | CTGCACAGCACGTGCGGACC | CIITA | 2008 |
| R5275 | TGGAAAAGGCCGGCCAGCAG | CIITA | 2009 |
| R5276 | TTCTGGAAAAGGCCGGCCAG | CIITA | 2010 |
| R5277 | TCCAGAAGAAGCTGCTCCGA | CIITA | 2011 |
| R5278 | CCAGAAGAAGCTGCTCCGAG | CIITA | 2012 |
| R5279 | CAGAAGAAGCTGCTCCGAGG | CIITA | 2013 |
| R5280 | CACCCTCCTCCTCACAGCCC | CIITA | 2014 |
| R5281 | CTCAGGCTCTGGACCAGGCG | CIITA | 2015 |
| R5282 | GAGCTGTCCGGCTTCTCCAT | CIITA | 2016 |
| R5283 | AGCTGTCCGGCTTCTCCATG | CIITA | 2017 |
| R5284 | TCCATGGAGCAGGCCCAGGC | CIITA | 2018 |
| R5285 | GAGAGCTCAGGGATGACAGA | CIITA | 2019 |
| R5286 | AGAGCTCAGGGATGACAGAG | CIITA | 2020 |
| R5287 | GTGCTCTGTCATCCCTGAGC | CIITA | 2021 |
| R5288 | TTCTCAGTCACAGCCACAGC | CIITA | 2022 |
| R5289 | TCAGTCACAGCCACAGCCCT | CIITA | 2023 |
| R5290 | GTGCCGGGCAGTGTGCCAGC | CIITA | 2024 |
| R5291 | TGCCGGGCAGTGTGCCAGCT | CIITA | 2025 |
| R5292 | GCGTCCTCCCCAAGCTCCAG | CIITA | 2026 |
| R5293 | GGGAGGACGCCAAGCTGCCC | CIITA | 2027 |
| R5294 | GCCAGCTCTGCCAGGGCCCC | CIITA | 2028 |
| R5295 | ATGTCTGCGGCCCAGCTCCC | CIITA | 2029 |
| R5392 | GATGTCTGCGGCCCAGCTCC | CIITA | 2030 |
| R5393 | CCATCCGCAGACGTGAGGAC | CIITA | 2031 |
| R5394 | GCCATCGCCCAGGTCCTCAC | CIITA | 2032 |
| R5395 | GGCCATCGCCCAGGTCCTCA | CIITA | 2033 |
| R5396 | GACTAAGCCTTTGGCCATCG | CIITA | 2034 |
| R5397 | GTCCAACACCCACCGCGGGC | CIITA | 2035 |
| R5398 | CAGGAGGAAGCTGGGGAAGG | CIITA | 2036 |
| R5399 | CCCAGCTTCCTCCTGCAATG | CIITA | 2037 |
| R5400 | CTCCTGCAATGCTTCCTGGG | CIITA | 2038 |
| R5401 | CTGGGGGCCCTGTGGCTGGC | CIITA | 2039 |
| R5402 | GCCACTCAGAGCCAGCCACA | CIITA | 2040 |
| R5403 | CGCCACTCAGAGCCAGCCAC | CIITA | 2041 |
| R5404 | ATTTCGCCACTCAGAGCCAG | CIITA | 2042 |
| R5405 | TCCTTGATTTCGCCACTCAG | CIITA | 2043 |
| R5406 | GGGTCAATGCTAGGTACTGC | CIITA | 2044 |
| R5407 | CTTGGGGTCAATGCTAGGTA | CIITA | 2045 |
| R5408 | TTCCTTGGGGTCAATGCTAG | CIITA | 2046 |
| R5409 | ACCCCAAGGAAGAAGAGGCC | CIITA | 2047 |
| R5410 | TCATAGGGCCTCTTCTTCCT | CIITA | 2048 |
| R5411 | CTGGCTGGGCTGATCTTCCA | CIITA | 2049 |
| R5412 | TGGCTGGGCTGATCTTCCAG | CIITA | 2050 |
| R5413 | CAGCCTCCCGCCCGCTGCCT | CIITA | 2051 |
| R5414 | CTGTCCACCGAGGCAGCCGC | CIITA | 2052 |
| R5415 | TGCTTCCTGTCCACCGAGGC | CIITA | 2053 |
| R5416 | AGGTACCTCGCAAGCACCTT | CIITA | 2054 |
| R5417 | CGAGGTACCTGAAGCGGCTG | CIITA | 2055 |
| R5418 | CAGCCTCCTCGGCCTCGTGG | CIITA | 2056 |
| R5419 | GGCAGCACGTGGTACAGGAG | CIITA | 2057 |
| R5420 | GCAGCACGTGGTACAGGAGC | CIITA | 2058 |
| R5421 | TCTGGGCACCCGCCTCACGC | CIITA | 2059 |
| R5422 | CTGGGCACCCGCCTCACGCC | CIITA | 2060 |
| R5423 | TGGGCACCCGCCTCACGCCT | CIITA | 2061 |
| R5424 | CCCAGTACATGTGCATCAGG | CIITA | 2062 |
| R5425 | GCCCGCCGCCTCCAAGGCCT | CIITA | 2063 |
| R5426 | GAGGCGGCGGGCCAAGACTT | CIITA | 2064 |
| R5427 | TCCCTGGACCTCCGCAGCAC | CIITA | 2065 |
| R5428 | GCCCCTCTGGATTGGGGAGC | CIITA | 2066 |
| R5429 | CCCCTCTGGATTGGGGAGCC | CIITA | 2067 |
| R5430 | GGGAGCCTCGTGGGACTCAG | CIITA | 2068 |
| R5431 | GTCTCCCCATGCTGCTGCAG | CIITA | 2069 |
| R5432 | TCCTCTGCTGCCTGAAGTAG | CIITA | 2070 |
| R5433 | AGGCAGCAGAGGAGAAGTTC | CIITA | 2071 |
| R5434 | AAAGGCTCGATGGTGAACTT | CIITA | 2072 |
| R5435 | GAAAGGCTCGATGGTGAACT | CIITA | 2073 |
| R5436 | ACCATCGAGCCTTTCAAAGC | CIITA | 2074 |
| R5437 | GCTTTGAAAGGCTCGATGGT | CIITA | 2075 |
| R5438 | AGGGACTTGGCTTTGAAAGG | CIITA | 2076 |
| R5439 | CAAAGCCAAGTCCCTGAAGG | CIITA | 2077 |
| R5440 | AAAGCCAAGTCCCTGAAGGA | CIITA | 2078 |
| R5441 | CACATCCTTCAGGGACTTGG | CIITA | 2079 |
| R5442 | CCAGGTCTTCCACATCCTTC | CIITA | 2080 |
| R5443 | CCCAGGTCTTCCACATCCTT | CIITA | 2081 |
| R5444 | CTCGGAAGACACAGCTGGGG | CIITA | 2082 |
| R5445 | GGTCCCGAACAGCAGGGAGC | CIITA | 2083 |
| R5446 | AGGTCCCGAACAGCAGGGAG | CIITA | 2084 |
| R5447 | TTTAGGTCCCGAACAGCAGG | CIITA | 2085 |
| R5448 | CTTTAGGTCCCGAACAGCAG | CIITA | 2086 |
| R5449 | GGGACCTAAAGAAACTGGAG | CIITA | 2087 |
| R5450 | GGGAAAGCCTGGGGGCCTGA | CIITA | 2088 |
| R5451 | GGGGAAAGCCTGGGGGCCTG | CIITA | 2089 |
| R5452 | CCCCAAACTGGTGCGGATCC | CIITA | 2090 |
| R5453 | CCCAAACTGGTGCGGATCCT | CIITA | 2091 |
| R5454 | TTCTCACTCAGCGCATCCAG | CIITA | 2092 |
| R5455 | AGCTGGGGGAAGGTGGCTGA | CIITA | 2093 |
| R5456 | CCCCAGCTGAAGTCCTTGGA | CIITA | 2094 |
| R5457 | CAAGGACTTCAGCTGGGGGA | CIITA | 2095 |
| R5458 | CCAAGGACTTCAGCTGGGGG | CIITA | 2096 |
| R5459 | AGGGTTTCCAAGGACTTCAG | CIITA | 2097 |
| R5460 | TAGGCACCCAGGTCAGTGAT | CIITA | 2098 |
| R5461 | GTAGGCACCCAGGTCAGTGA | CIITA | 2099 |
| R5462 | GCTCGCTGCATCCCTGCTCA | CIITA | 2100 |
| R5463 | GCCTGAGCAGGGATGCAGCG | CIITA | 2101 |
| R5464 | TACAATAACTGCATCTGCGA | CIITA | 2102 |
| R5465 | GCTCGTGTGCTTCCGGACAT | CIITA | 2103 |
| R5466 | CGGACATGGTGTCCCTCCGG | CIITA | 2104 |
| R5467 | ACGGCTGCCGGGGCCCAGCA | CIITA | 2105 |
| R5468 | GGAGGTGTCCTCATGTGGAG | CIITA | 2106 |
| R5469 | CTGGACACTGAATGGGATGG | CIITA | 2107 |
| R5470 | AGTGTCCAGGAACACCTGCA | CIITA | 2108 |
| R5471 | CAGGTGTTCCTGGACACTGA | CIITA | 2109 |
| R5472 | TTGCAGGTGTTCCTGGACAC | CIITA | 2110 |
| R5473 | ACGGATCAGCCTGAGATGAT | CIITA | 2111 |

TABLE E
spacer sequences of gRNAs targeting mouse PCSK9

| | | | SEQ |
|---|---|---|---|
| | Spacer sequence | | ID. |
| Name | (5′ --> 3′) | Target | NO. |
| R4238 | CCGCUGUUGCCGCCGCUGCU | PCSK9 | 347 |
| R4239 | CCGCCGCUGCUGCUGCUGUU | PCSK9 | 348 |
| R4240 | CUGCUACUGUGCCCCACCGG | PCSK9 | 349 |
| R4241 | AUAAUCUCCAUCCUCGUCCU | PCSK9 | 350 |
| R4242 | UGAAGAGCUGAUGCUCGCCC | PCSK9 | 351 |
| R4243 | GAGCAACGGCGGAAGGUGGC | PCSK9 | 352 |
| R4244 | CUGGCAGCCUCCAGGCCUCC | PCSK9 | 353 |
| R4245 | UGGUGCUGAUGGAGGAGACC | PCSK9 | 354 |
| R4246 | AAUCUGUAGCCUCUGGGUCU | PCSK9 | 355 |
| R4247 | UUCAAUCUGUAGCCUCUGGG | PCSK9 | 356 |
| R4248 | GUUCAAUCUGUAGCCUCUGG | PCSK9 | 357 |
| R4249 | AACAAACUGCCCACCGCCUG | PCSK9 | 358 |
| R4250 | AUGACAUAGCCCCGGCGGGC | PCSK9 | 359 |
| R4251 | UACAUAUCUUUUAUGACCUC | PCSK9 | 360 |
| R4252 | UAUGACCUCUUCCCUGGCUU | PCSK9 | 361 |
| R4253 | AUGACCUCUUCCCUGGCUUC | PCSK9 | 362 |
| R4254 | UGACCUCUUCCCUGGCUUCU | PCSK9 | 363 |
| R4255 | ACCAAGAAGCCAGGGAAGAG | PCSK9 | 364 |
| R4256 | CCUGGCUUCUUGGUGAAGAU | PCSK9 | 365 |
| R4257 | UUGGUGAAGAUGAGCAGUGA | PCSK9 | 366 |
| R4258 | GUGAAGAUGAGCAGUGACCU | PCSK9 | 367 |
| R4259 | CCCCAUGUGGAGUACAUUGA | PCSK9 | 368 |
| R4260 | CUCAAUGUACUCCACAUGGG | PCSK9 | 369 |
| R4261 | AGGAAGACUCCUUUGUCUUC | PCSK9 | 370 |
| R4262 | GUCUUCGCCCAGAGCAUCCC | PCSK9 | 371 |
| R4263 | UCUUCGCCCAGAGCAUCCCA | PCSK9 | 372 |
| R4264 | GCCCAGAGCAUCCCAUGGAA | PCSK9 | 373 |
| R4265 | CAUGGGAUGCUCUGGGCGAA | PCSK9 | 374 |
| R4266 | GCUCCAGGUUCCAUGGGAUG | PCSK9 | 375 |
| R4267 | UCCCAGCAUGGCACCAGACA | PCSK9 | 376 |
| R4268 | CUCUGUCUGGUGCCAUGCUG | PCSK9 | 377 |
| R4269 | GAUACCAGCAUCCAGGGUGC | PCSK9 | 378 |
| R4270 | AGGGCAGGGUCACCAUCACC | PCSK9 | 379 |
| R4271 | AAGUCGGUGAUGGUGACCCU | PCSK9 | 380 |
| R4272 | AACAGCGUGCCGGAGGAGGA | PCSK9 | 381 |
| R4273 | GCCACACCAGCAUCCCGGCC | PCSK9 | 382 |
| R4274 | AGCACACGCAGGCUGUGCAG | PCSK9 | 383 |
| R4275 | ACAGUUGAGCACACGCAGGC | PCSK9 | 384 |
| R4276 | CCUUGACAGUUGAGCACACG | PCSK9 | 385 |
| R4277 | GCUGACUCUUCCGAAUAAAC | PCSK9 | 386 |
| R4278 | AUUCGGAAGAGUCAGCUAAU | PCSK9 | 387 |
| R4279 | UUCGGAAGAGUCAGCUAAUC | PCSK9 | 388 |
| R4280 | GGAAGAGUCAGCUAAUCCAG | PCSK9 | 389 |
| R4281 | UGCUGCCCCUGGCCGGUGGG | PCSK9 | 390 |
| R4282 | AGGAUGCGGCUAUACCCACC | PCSK9 | 391 |
| R4283 | CCAGCUGCUGCAACCAGCAC | PCSK9 | 392 |
| R4284 | CAGCAGCUGGGAACUUCCGG | PCSK9 | 393 |
| R4285 | CGGGACGACGCCUGCCUCUA | PCSK9 | 394 |
| R4286 | GUGGCCCCGACUGUGAUGAC | PCSK9 | 395 |
| R4287 | CCUUGGGGACUUUGGGGACU | PCSK9 | 396 |
| R4288 | GUCCCCAAAGUCCCCAAGGU | PCSK9 | 397 |
| R4289 | GGGACUUUGGGGACUAAUUU | PCSK9 | 398 |
| R4290 | GGGGACUAAUUUUGGACGCU | PCSK9 | 399 |
| R4291 | GGGACUAAUUUUGGACGCUG | PCSK9 | 400 |
| R4292 | UGGACGCUGUGUGGAUCUCU | PCSK9 | 401 |
| R4293 | GGACGCUGUGUGGAUCUCUU | PCSK9 | 402 |
| R4294 | GACGCUGUGUGGAUCUCUUU | PCSK9 | 403 |
| R4295 | CCGGGGGCAAAGAGAUCCAC | PCSK9 | 404 |
| R4296 | GCCCCCGGGAAGGACAUCAU | PCSK9 | 405 |
| R4297 | CCCCCGGGAAGGACAUCAUC | PCSK9 | 406 |
| R4298 | AUGUCACAGAGUGGGACCUC | PCSK9 | 407 |
| R4299 | UGGCUCGGAUGCUGAGCCGG | PCSK9 | 408 |
| R4300 | CCCUGGCCGAGCUGCGGCAG | PCSK9 | 409 |
| R4301 | GUAGAGAAGUGGAUCAGCCU | PCSK9 | 410 |
| R4302 | GGUAGAGAAGUGGAUCAGCC | PCSK9 | 411 |
| R4303 | UCUACCAAAGACGUCAUCAA | PCSK9 | 412 |
| R4304 | AUGACGUCUUUGGUAGAGAA | PCSK9 | 413 |
| R4305 | CCUGAGGACCAGCAGGUGCU | PCSK9 | 414 |
| R4306 | GGGGUCAGCACCUGCUGGUC | PCSK9 | 415 |
| R4307 | GAGUGGGCCCCGAGUGUGCC | PCSK9 | 416 |
| R4308 | UGGGGCACAGCGGGCUGUAG | PCSK9 | 417 |
| R4309 | UCCAGGAGCGGGAGGCGUCG | PCSK9 | 418 |
| R4310 | CAGACCUGCUGGCCUCCUAU | PCSK9 | 419 |
| R4311 | AGGGCCUUGCAGACCUGCUG | PCSK9 | 420 |
| R4312 | GGGGGUGAGGGUGUCUAUGC | PCSK9 | 421 |
| R4313 | GGGGUGAGGGUGUCUAUGCC | PCSK9 | 422 |
| R4314 | GCACGGGGAACCAGGCAGCA | PCSK9 | 423 |
| R4315 | CCCGUGCCAACUGCAGCAUC | PCSK9 | 424 |
| R4316 | UGGAUGCUGCAGUUGGCACG | PCSK9 | 425 |
| R4317 | UGGUGGCAGUGGACAUGGGU | PCSK9 | 426 |
| R4318 | CACUUCCCAAUGGAAGCUGC | PCSK9 | 427 |
| R4319 | CAUUGGGAAGUGGAAGACCU | PCSK9 | 428 |
| R4320 | GGAAGUGGAAGACCUUAGUG | PCSK9 | 429 |
| R4321 | GUGUCCGGAGGCAGCCUGCG | PCSK9 | 430 |
| R4322 | GCCACCAGGCGGCCAGUGUC | PCSK9 | 431 |
| R4323 | CUGCUGCCAUGCCCCAGGGC | PCSK9 | 432 |
| R4324 | CAGCCCUGGGGCAUGGCAGC | PCSK9 | 433 |
| R4325 | CAUUCCAGCCCUGGGGCAUG | PCSK9 | 434 |
| R4326 | GCAUUCCAGCCCUGGGGCAU | PCSK9 | 435 |
| R4327 | UGCAUUCCAGCCCUGGGGCA | PCSK9 | 436 |
| R4328 | AUUUUGCAUUCCAGCCCUGG | PCSK9 | 437 |
| R4329 | CAUCCAGUCAGGGUCCAUCC | PCSK9 | 438 |
| R4330 | UCCACGCUGUAGGCUCCCAG | PCSK9 | 439 |
| R4331 | CCACACACAGGUUGUCCACG | PCSK9 | 440 |
| R4332 | UCCACUGGUCCUGUCUGCUC | PCSK9 | 441 |
| R4333 | CUGAAGGCCGGCUCCGGCAG | PCSK9 | 442 |

TABLE F
spacer sequences of gRNAs
targets Bak1 in CHO cells

| | Spacer sequence | SEQ |
|---|---|---|
| | (5′ --> 3′), | ID |
| Name | shown as DNA | NO |
| R2452_Bak1_CasPhi_1 | GAAGCTATGTTTTCCATCTC | 443 |
| R2453_Bak1_CasPhi_2 | GCAGGGGCAGCCGCCCCCTG | 444 |
| R2454_Bak1_CasPhi_3 | CTCCTAGAACCCAACAGGTA | 445 |
| R2455_Bak1_CasPhi_4 | GAAAGACCTCCTCTGTGTCC | 446 |
| R2456_Bak1_CasPhi_5 | TCCATCTCGGGGTTGGCAGG | 447 |
| R2457_Bak1_CasPhi_6 | TTCCTGATGGTGGAGATGGA | 448 |
| R2849_Bak1_nsd_sg1 | CTGACTCCCAGCTCTGACCC | 449 |
| R2850_Bak1_nsd_sg2 | TGGGGTCAGAGCTGGGAGTC | 450 |
| R2851_Bak1_nsd_sg3 | GAAAGACCTCCTCTGTGTCC | 451 |
| R2852_Bak1_nsd_sg4 | CGAAGCTATGTTTTCCATCT | 452 |
| R2853_Bak1_nsd_sg5 | GAAGCTATGTTTTCCATCTC | 453 |
| R2854_Bak1_nsd_sg6 | TCCATCTCCACCATCAGGAA | 454 |
| R2855_Bak1_nsd_sg7 | CCATCTCCACCATCAGGAAC | 455 |
| R2856_Bak1_nsd_sg8 | CTGATGGTGGAGATGGAAAA | 456 |
| R2857_Bak1_nsd_sg9 | CATCTCCACCATCAGGAACA | 457 |
| R2858_Bak1_nsd_sg10 | TTCCTGATGGTGGAGATGGA | 458 |
| R2859_Bak1_nsd_sg11 | GCAGGGGCAGCCGCCCCCTG | 459 |
| R2860_Bak1_nsd_sg12 | TCCATCTCGGGGTTGGCAGG | 460 |
| R2861_Bak1_nsd_sg13 | TAGGAGCAAATTGTCCATCT | 461 |
| R2862_Bak1_nsd_sg14 | GGTTCTAGGAGCAAATTGTC | 462 |
| R2863_Bak1_nsd_sg15 | GCTCCTAGAACCCAACAGGT | 463 |
| R2864_Bak1_nsd_sg16 | CTCCTAGAACCCAACAGGTA | 464 |
| R3977_Bak1_exon1_sg1 | TCCAGACGCCATCTTTCAGG | 465 |
| R3978_Bak1_exon1_sg2 | TGGTAAGAGTCCTCCTGCCC | 466 |
| R3979_Bak1_exon3_sg1 | TTACAGCATCTTGGGTCAGG | 467 |
| R3980_Bak1_exon3_sg2 | GGTCAGGTGGGCCGGCAGCT | 468 |
| R3981_Bak1_exon3_sg3 | CTATCATTGGAGATGACATT | 469 |
| R3982_Bak1_exon3_sg4 | GAGATGACATTAACCGGAGA | 470 |
| R3983_Bak1_exon3_sg5 | TGGAACTCTGTGTCGTATCT | 471 |
| R3984_Bak1_exon3_sg6 | CAGAATTTACTGGAGCAGCT | 472 |
| R3985_Bak1_exon3_sg7 | ACTGGAGCAGCTGCAGCCCA | 473 |
| R3986_Bak1_exon3_sg8 | CCAGCTGTGGGCTGCAGCTG | 474 |
| R3987_Bak1_exon3_sg9 | GTAGGCATTCCCAGCTGTGG | 475 |
| R3988_Bak1_exon3_sg10 | GTGAAGAGTTCGTAGGCATT | 476 |
| R3989_Bak1_exon3_sg11 | ACCAAGATTGCCTCCAGGTA | 477 |
| R3990_Bak1_exon3_sg12 | CCTCCAGGTACCCACCACCA | 478 |

TABLE G
spacer sequences of gRNAs
targeting Bax in CHO cells

| | Spacer sequence | SEQ |
|---|---|---|
| | (5′ --> 3′), | ID |
| Name | shown as DNA | NO |
| R2458_Bax_CasPhi_1 | CTAATGTGGATACTAACTCC | 479 |
| R2459_Bax_CasPhi_2 | TTCCGTGTGGCAGCTGACAT | 480 |
| R2460_Bax_CasPhi_3 | CTGATGGCAACTTCAACTGG | 481 |
| R2461_Bax_CasPhi_4 | TACTTTGCTAGCAAACTGGT | 482 |
| R2462_Bax_CasPhi_5 | AGCACCAGTTTGCTAGCAAA | 483 |
| R2463_Bax_CasPhi_6 | AACTGGGGCCGGGTTGTTGC | 484 |
| R2865_Bax_nsd_sg1 | TTCTCTTTCCTGTAGGATGA | 485 |
| R2866_Bax_nsd_sg2 | TCTTTCCTGTAGGATGATTG | 486 |
| R2867_Bax_nsd_sg3 | CCTGTAGGATGATTGCTAAT | 487 |
| R2868_Bax_nsd_sg4 | CTGTAGGATGATTGCTAATG | 488 |
| R2869_Bax_nsd_sg5 | CTAATGTGGATACTAACTCC | 489 |
| R2870_Bax_nsd_sg6 | TTCCGTGTGGCAGCTGACAT | 490 |
| R2871_Bax_nsd_sg7 | CGTGTGGCAGCTGACATGTT | 491 |
| R2872_Bax_nsd_sg8 | CCATCAGCAAACATGTCAGC | 492 |
| R2873_Bax_nsd_sg9 | AAGTTGCCATCAGCAAACAT | 493 |
| R2874_Bax_nsd_sg10 | GCTGATGGCAACTTCAACTG | 494 |
| R2875_Bax_nsd_sg11 | CTGATGGCAACTTCAACTGG | 495 |
| R2876_Bax_nsd_sg12 | AACTGGGGCCGGGTTGTTGC | 496 |
| R2877_Bax_nsd_sg13 | TTGCCCTTTTCTACTTTGCT | 497 |
| R2878_Bax_nsd_sg14 | CCCTTTTCTACTTTGCTAGC | 498 |
| R2879_Bax_nsd_sg15 | CTAGCAAAGTAGAAAAGGGC | 499 |
| R2880_Bax_nsd_sg16 | GCTAGCAAAGTAGAAAAGGG | 500 |
| R2881_Bax_nsd_sg17 | TCTACTTTGCTAGCAAACTG | 501 |
| R2882_Bax_nsd_sg18 | CTACTTTGCTAGCAAACTGG | 502 |
| R2883_Bax_nsd_sg19 | TACTTTGCTAGCAAACTGGT | 503 |
| R2884_Bax_nsd_sg20 | GCTAGCAAACTGGTGCTCAA | 504 |
| R2885_Bax_nsd_sg21 | CTAGCAAACTGGTGCTCAAG | 505 |
| R2886_Bax_nsd_sg22 | AGCACCAGTTTGCTAGCAAA | 506 |

TABLE H
spacer sequences of gRNAs
targeting Fut8 in CHO cells

| | Spacer sequence | SEQ |
|---|---|---|
| | (5′ --> 3′), | ID |
| Name | shown as DNA | NO |
| R2464_Fut8_CasPhi_1 | CCACTTTGTCAGTGCGTCTG | 507 |
| R2465_Fut8_casPhi_2 | CTCAATGGGATGGAAGGCTG | 508 |
| R2466_Fut8_CasPhi_3 | AGGAATACATGGTACACGTT | 509 |
| R2467_Fut8_CasPhi_4 | AAGAACATTTTCAGCTTCTC | 510 |
| R2468_Fut8_CasPhi_5 | ATCCACTTTCATTCTGCGTT | 511 |
| R2469_Fut8_CasPhi_6 | TTTGTTAAAGGAGGCAAAGA | 512 |
| R2887_Fut8_nsd_sg1 | TCCCCAGAGTCCATGTCAGA | 513 |
| R2888_Fut8_nsd_sg2 | TCAGTGCGTCTGACATGGAC | 514 |
| R2889_Fut8_nsd_sg3 | GTCAGTGCGTCTGACATGGA | 515 |
| R2890_Fut8_nsd_sg4 | CCACTTTGTCAGTGCGTCTG | 516 |
| R2891_Fut8_nsd_sg5 | TGTTCCCACTTTGTCAGTGC | 517 |
| R2892_Fut8_nsd_sg6 | CTCAATGGGATGGAAGGCTG | 518 |
| R2893_Fut8_nsd_sg7 | CATCCCATTGAGGAATACAT | 519 |
| R2894_Fut8_nsd_sg8 | AGGAATACATGGTACACGTT | 520 |
| R2895_Fut8_nsd_sg9 | AACGTGTACCATGTATTCCT | 521 |
| R2896_Fut8_nsd_sg10 | TTCAACGTGTACCATGTATT | 522 |
| R2897_Fut8_nsd_sg11 | AAGAACATTTTCAGCTTCTC | 523 |
| R2898_Fut8_nsd_sg12 | GAGAAGCTGAAAATGTTCTT | 524 |
| R2899_Fut8_nsd_sg13 | TCAGCTTCTCGAACGCAGAA | 525 |
| R2900_Fut8_nsd_sg14 | CAGCTTCTCGAACGCAGAAT | 526 |
| R2901_Fut8_nsd_sg15 | TGCGTTCGAGAAGCTGAAAA | 527 |
| R2902_Fut8_nsd_sg16 | AGCTTCTCGAACGCAGAATG | 528 |
| R2903_Fut8_nsd_sg17 | ATTCTGCGTTCGAGAAGCTG | 529 |
| R2904_Fut8_nsd_sg18 | CATTCTGCGTTCGAGAAGCT | 530 |
| R2905_Fut8_nsd_sg19 | TCGAACGCAGAATGAAAGTG | 531 |
| R2906_Fut8_nsd_sg20 | ATCCACTTTCATTCTGCGTT | 532 |
| R2907_Fut8_nsd_sg21 | TATCCACTTTCATTCTGCGT | 533 |
| R2908_Fut8_nsd_sg22 | TTATCCACTTTCATTCTGCG | 534 |
| R2909_Fut8_nsd_sg23 | TTTATCCACTTTCATTCTGC | 535 |
| R2910_Fut8_nsd_sg24 | TTTTATCCACTTTCATTCTG | 536 |
| R2911_Fut8_nsd_sg25 | AACAAAGAAGGGTCATCAGT | 537 |
| R2912_Fut8_nsd_sg26 | CCTCCTTTAACAAAGAAGGG | 538 |
| R2913_Fut8_nsd_sg27 | GCCTCCTTTAACAAAGAAGG | 539 |
| R2914_Fut8_nsd_sg28 | TTTGTTAAAGGAGGCAAAGA | 540 |
| R2915_Fut8_nsd_sg29 | GTTAAAGGAGGCAAAGACAA | 541 |
| R2916_Fut8_nsd_sg30 | TTAAAGGAGGCAAAGACAAA | 542 |
| R2917_Fut8_nsd_sg31 | TCTTTGCCTCCTTTAACAAA | 543 |
| R2918_Fut8_nsd_sg32 | GTCTTTGCCTCCTTTAACAA | 544 |
| R2919_Fut8_nsd_sg33 | GTCTAACTTACTTTGTCTTT | 545 |
| R2920_Fut8_nsd_sg34 | TTGGTCTAACTTACTTTGTC | 546 |

TABLE 1
CasΦ.12 gRNAs targeting human
TRAC in T cells

| | Repeate + spacer | |
|---|---|---|
| | RNA Sequence | SEQ |
| | (5′ --> 3′), | ID |
| Name | shown as DNA | NO |
| R3040_ | CTTTCAAGACTAATAGAT | 547 |
| CasP | TGCTCCTTACGAGGAGAC | |
| hi12 | TGGATATCTGTGGGACAA | |
| | GA | |
| R3041_ | CTTTCAAGACTAATAGAT | 548 |
| CasP | TGCTCCTTACGAGGAGAC | |
| hi12 | TCCCACAGATATCCAGAA | |
| | CC | |
| R3042_ | CTTTCAAGACTAATAGAT | 549 |
| CasP | TGCTCCTTACGAGGAGAC | |
| hi12 | GAGTCTCTCAGCTGGTAC | |
| | AC | |
| R3043_ | CTTTCAAGACTAATAGAT | 550 |
| CasP | TGCTCCTTACGAGGAGAC | |
| hi12 | AGAGTCTCTCAGCTGGTA | |
| | CA | |
| R3044_ | CTTTCAAGACTAATAGAT | 551 |
| CasP | TGCTCCTTACGAGGAGAC | |
| hi12 | TCACTGGATTTAGAGTCT | |
| | CT | |
| R3045_ | CTTTCAAGACTAATAGAT | 552 |
| CasP | TGCTCCTTACGAGGAGAC | |
| hi12 | AGAATCAAAATCGGTGAA | |
| | TA | |
| R3046_ | CTTTCAAGACTAATAGAT | 553 |
| CasP | TGCTCCTTACGAGGAGAC | |
| hi12 | GAGAATCAAAATCGGTGA | |
| | AT | |
| R3047_ | CTTTCAAGACTAATAGAT | 554 |
| CasP | TGCTCCTTACGAGGAGAC | |
| hi12 | ACCGATTTTGATTCTCAA | |
| | AC | |
| R3048_ | CTTTCAAGACTAATAGAT | 555 |
| CasP | TGCTCCTTACGAGGAGAC | |
| hi12 | TTTGAGAATCAAAATCGG | |
| | TG | |
| R3049_ | CTTTCAAGACTAATAGAT | 556 |
| CasP | TGCTCCTTACGAGGAGAC | |
| hi12 | GTTTGAGAATCAAAATCG | |
| | GT | |
| R3050_ | CTTTCAAGACTAATAGAT | 557 |
| CasP | TGCTCCTTACGAGGAGAC | |
| hi12 | TGATTCTCAAACAAATGT | |
| | GT | |
| R3051_ | CTTTCAAGACTAATAGAT | 558 |
| CasP | TGCTCCTTACGAGGAGAC | |
| hi12 | GATTCTCAAACAAATGTG | |
| | TC | |
| R3052_ | CTTTCAAGACTAATAGAT | 559 |
| CasP | TGCTCCTTACGAGGAGAC | |
| hi12 | ATTCTCAAACAAATGTGT | |
| | CA | |
| R3053_ | CTTTCAAGACTAATAGAT | 560 |
| CasP | TGCTCCTTACGAGGAGAC | |
| hi12 | TGACACATTTGTTTGAGA | |
| | AT | |
| R3054_ | CTTTCAAGACTAATAGAT | 561 |
| CasP | TGCTCCTTACGAGGAGAC | |
| hi12 | TCAAACAAATGTGTCACA | |
| | AA | |
| R3055_ | CTTTCAAGACTAATAGAT | 562 |
| CasP | TGCTCCTTACGAGGAGAC | |
| hi12 | GTGACACATTTGTTTGAG | |
| | AA | |
| R3056_ | CTTTCAAGACTAATAGAT | 563 |
| CasP | TGCTCCTTACGAGGAGAC | |
| hi12 | CTTTGTGACACATTTGTT | |
| | TG | |
| R3057_ | CTTTCAAGACTAATAGAT | 564 |
| CasP | TGCTCCTTACGAGGAGAC | |
| hi12 | TGATGTGTATATCACAGA | |
| | CA | |
| R3058_ | CTTTCAAGACTAATAGAT | 565 |
| CasP | TGCTCCTTACGAGGAGAC | |
| hi12 | TCTGTGATATACACATCA | |
| | GA | |
| R3059_ | CTTTCAAGACTAATAGAT | 566 |
| CasP | TGCTCCTTACGAGGAGAC | |
| hi12 | GTCTGTGATATACACATC | |
| | AG | |
| R3060_ | CTTTCAAGACTAATAGAT | 567 |
| CasP | TGCTCCTTACGAGGAGAC | |
| hi12 | TGTCTGTGATATACACAT | |
| | CA | |
| R3061_ | CTTTCAAGACTAATAGAT | 568 |
| CasP | TGCTCCTTACGAGGAGAC | |
| hi12 | AAGTCCATAGACCTCATG | |
| | TC | |
| R3062_ | CTTTCAAGACTAATAGAT | 569 |
| CasP | TGCTCCTTACGAGGAGAC | |
| hi12 | CTCTTGAAGTCCATAGAC | |
| | CT | |
| R3063_ | CTTTCAAGACTAATAGAT | 570 |
| CasP | TGCTCCTTACGAGGAGAC | |
| hi12 | AAGAGCAACAGTGCTGTG | |
| | GC | |
| R3064_ | CTTTCAAGACTAATAGAT | 571 |
| CasP | TGCTCCTTACGAGGAGAC | |
| hi12 | CTCCAGGCCACAGCACTG | |
| | TT | |
| R3065_ | CTTTCAAGACTAATAGAT | 572 |
| CasP | TGCTCCTTACGAGGAGAC | |
| hi12 | TTGCTCCAGGCCACAGCA | |
| | CT | |
| R3066_ | CTTTCAAGACTAATAGAT | 573 |
| CasP | TGCTCCTTACGAGGAGAC | |
| hi12 | GTTGCTCCAGGCCACAGC | |
| | AC | |
| R3067_ | CTTTCAAGACTAATAGAT | 574 |
| CasP | TGCTCCTTACGAGGAGAC | |
| hi12 | CACATGCAAAGTCAGATT | |
| | TG | |
| R3068_ | CTTTCAAGACTAATAGAT | 575 |
| CasP | TGCTCCTTACGAGGAGAC | |
| hi12 | GCACATGCAAAGTCAGAT | |
| | TT | |
| R3069_ | CTTTCAAGACTAATAGAT | 576 |
| CasP | TGCTCCTTACGAGGAGAC | |
| hi12 | GCATGTGCAAACGCCTTC | |
| | AA | |
| R3070_ | CTTTCAAGACTAATAGAT | 577 |
| CasP | TGCTCCTTACGAGGAGAC | |
| hi12 | AAGGCGTTTGCACATGCA | |
| | AA | |
| R3071_ | CTTTCAAGACTAATAGAT | 578 |
| CasP | TGCTCCTTACGAGGAGAC | |
| hi12 | CATGTGCAAACGCCTTCA | |
| | AC | |
| R3072_ | CTTTCAAGACTAATAGAT | 579 |
| CasP | TGCTCCTTACGAGGAGAC | |
| hi12 | TTGAAGGCGTTTGCACAT | |
| | GC | |
| R3073_ | CTTTCAAGACTAATAGAT | 580 |
| CasP | TGCTCCTTACGAGGAGAC | |
| hi12 | AACAACAGCATTATTCCA | |
| | GA | |
| R3074_ | CTTTCAAGACTAATAGAT | 581 |
| CasP | TGCTCCTTACGAGGAGAC | |
| hi12 | TGGAATAATGCTGTTGTT | |
| | GA | |
| R3075_ | CTTTCAAGACTAATAGAT | 582 |
| CasP | TGCTCCTTACGAGGAGAC | |
| hi12 | TTCCAGAAGACACCTTCT | |
| | TC | |
| R3076_ | CTTTCAAGACTAATAGAT | 583 |
| CasP | TGCTCCTTACGAGGAGAC | |
| hi12 | CAGAAGACACCTTCTTCC | |
| | CC | |
| R3077_ | CTTTCAAGACTAATAGAT | 584 |
| CasP | TGCTCCTTACGAGGAGAC | |
| hi12 | CCTGGGCTGGGGAAGAAG | |
| | GT | |
| R3078_ | CTTTCAAGACTAATAGAT | 585 |
| CasP | TGCTCCTTACGAGGAGAC | |
| hi12 | TTCCCCAGCCCAGGTAAG | |
| | GG | |
| R3079_ | CTTTCAAGACTAATAGAT | 586 |
| CasP | TGCTCCTTACGAGGAGAC | |
| hi12 | CCCAGCCCAGGTAAGGGC | |
| | AG | |
| R3080_ | CTTTCAAGACTAATAGAT | 587 |
| CasP | TGCTCCTTACGAGGAGAC | |
| hi12 | TAAAAGGAAAAACAGACA | |
| | TT | |
| R3081_ | CTTTCAAGACTAATAGAT | 588 |
| CasP | TGCTCCTTACGAGGAGAC | |
| hi12 | CTAAAAGGAAAAACAGAC | |
| | AT | |
| R3082_ | CTTTCAAGACTAATAGAT | 589 |
| CasP | TGCTCCTTACGAGGAGAC | |
| hi12 | TTCCTTTTAGAAAGTTCC | |
| | TG | |
| R3083_ | CTTTCAAGACTAATAGAT | 590 |
| CasP | TGCTCCTTACGAGGAGAC | |
| hi12 | TCCTTTTAGAAAGTTCCT | |
| | GT | |
| R3084_ | CTTTCAAGACTAATAGAT | 591 |
| CasP | TGCTCCTTACGAGGAGAC | |
| hi12 | CCTTTTAGAAAGTTCCTG | |
| | TG | |
| R3085_ | CTTTCAAGACTAATAGAT | 592 |
| CasP | TGCTCCTTACGAGGAGAC | |
| hi12 | CTTTTAGAAAGTTCCTGT | |
| | GA | |
| R3086_ | CTTTCAAGACTAATAGAT | 593 |
| CasP | TGCTCCTTACGAGGAGAC | |
| hi12 | TAGAAAGTTCCTGTGATG | |
| | TC | |
| R3136_ | CTTTCAAGACTAATAGAT | 594 |
| CasP | TGCTCCTTACGAGGAGAC | |
| hi12 | AGAAAGTTCCTGTGATGT | |
| | CA | |
| R3137_ | CTTTCAAGACTAATAGAT | 595 |
| CasP | TGCTCCTTACGAGGAGAC | |
| hi12 | GAAAGTTCCTGTGATGTC | |
| | AA | |
| R3138_ | CTTTCAAGACTAATAGAT | 596 |
| CasP | TGCTCCTTACGAGGAGAC | |
| hi12 | ACATCACAGGAACTTTCT | |
| | AA | |
| R3139_ | CTTTCAAGACTAATAGAT | 597 |
| CasP | TGCTCCTTACGAGGAGAC | |
| hi12 | CTGTGATGTCAAGCTGGT | |
| | CG | |
| R3140_ | CTTTCAAGACTAATAGAT | 598 |
| CasP | TGCTCCTTACGAGGAGAC | |
| hi12 | TCGACCAGCTTGACATCA | |
| | CA | |
| R3141_ | CTTTCAAGACTAATAGAT | 599 |
| CasP | TGCTCCTTACGAGGAGAC | |
| hi12 | CTCGACCAGCTTGACATC | |
| | AC | |
| R3142_ | CTTTCAAGACTAATAGAT | 600 |
| CasP | TGCTCCTTACGAGGAGAC | |
| hi12 | TCTCGACCAGCTTGACAT | |
| | CA | |
| R3143_ | CTTTCAAGACTAATAGAT | 601 |
| CasP | TGCTCCTTACGAGGAGAC | |
| hi12 | AAAGCTTTTCTCGACCAG | |
| | CT | |
| R3144_ | CTTTCAAGACTAATAGAT | 602 |
| CasP | TGCTCCTTACGAGGAGAC | |
| hi12 | CAAAGCTTTTCTCGACCA | |
| | GC | |
| R3145_ | CTTTCAAGACTAATAGAT | 603 |
| CasP | TGCTCCTTACGAGGAGAC | |
| hi12 | CCTGTTTCAAAGCTTTTC | |
| | TC | |
| R3146_ | CTTTCAAGACTAATAGAT | 604 |
| CasP | TGCTCCTTACGAGGAGAC | |
| hi12 | GAAACAGGTAAGACAGGG | |
| | GT | |
| R3147_ | CTTTCAAGACTAATAGAT | 605 |
| CasP | TGCTCCTTACGAGGAGAC | |
| hi12 | AAACAGGTAAGACAGGGG | |
| | TC | |

TABLE J
CasΦ.32 gRNAs targeting human TRAC in T cells

| | Repeat + spacer | |
|---|---|---|
| | RNA Sequence | SEQ |
| | (5′ --> 3′), | ID |
| Name | shown as DNA | NO |
| R3040_ | GCTGGGGACCGATCCTGA | 606 |
| Cas | TTGCTCGCTGCGGCGAGA | |
| Phi32 | CTGGATATCTGTGGGACA | |
| | AGA | |
| R3041_ | GCTGGGGACCGATCCTGA | 607 |
| Cas | TTGCTCGCTGCGGCGAGA | |
| Phi32 | CTCCCACAGATATCCAGA | |
| | ACC | |
| R3042_ | GCTGGGGACCGATCCTGA | 608 |
| Cas | TTGCTCGCTGCGGCGAGA | |
| Phi32 | CGAGTCTCTCAGCTGGTA | |
| | CAC | |
| R3043_ | GCTGGGGACCGATCCTGA | 609 |
| Cas | TTGCTCGCTGCGGCGAGA | |
| Phi32 | CAGAGTCTCTCAGCTGGT | |
| | ACA | |
| R3044_ | GCTGGGGACCGATCCTGA | 610 |
| Cas | TTGCTCGCTGCGGCGAGA | |
| Phi32 | CTCACTGGATTTAGAGTC | |
| | TCT | |
| R3045_ | GCTGGGGACCGATCCTGA | 611 |
| Cas | TTGCTCGCTGCGGCGAGA | |
| Phi32 | CAGAATCAAAATCGGTGA | |
| | ATA | |
| R3046_ | GCTGGGGACCGATCCTGA | 612 |
| Cas | TTGCTCGCTGCGGCGAGA | |
| Phi32 | CGAGAATCAAAATCGGTG | |
| | AAT | |
| R3047_ | GCTGGGGACCGATCCTGA | 613 |
| Cas | TTGCTCGCTGCGGCGAGA | |
| Phi32 | CACCGATTTTGATTCTCA | |
| | AAC | |
| R3048_ | GCTGGGGACCGATCCTGA | 614 |
| Cas | TTGCTCGCTGCGGCGAGA | |
| Phi32 | CTTTGAGAATCAAAATCG | |
| | GTG | |
| R3049_ | GCTGGGGACCGATCCTGA | 615 |
| Cas | TTGCTCGCTGCGGCGAGA | |
| Phi32 | CGTTTGAGAATCAAAATC | |
| | GGT | |
| R3050_ | GCTGGGGACCGATCCTGA | 616 |
| Cas | TTGCTCGCTGCGGCGAGA | |
| Phi32 | CTGATTCTCAAACAAATG | |
| | TGT | |
| R3051_ | GCTGGGGACCGATCCTGA | 617 |
| Cas | TTGCTCGCTGCGGCGAGA | |
| Phi32 | CGATTCTCAAACAAATGT | |
| | GTC | |
| R3052_ | GCTGGGGACCGATCCTGA | 618 |
| Cas | TTGCTCGCTGCGGCGAGA | |
| Phi32 | CATTCTCAAACAAATGTG | |
| | TCA | |
| R3053_ | GCTGGGGACCGATCCTGA | 619 |
| Cas | TTGCTCGCTGCGGCGAGA | |
| Phi32 | CTGACACATTTGTTTGAG | |
| | AAT | |
| R3054_ | GCTGGGGACCGATCCTGA | 620 |
| Cas | TTGCTCGCTGCGGCGAGA | |
| Phi32 | CTCAAACAAATGTGTCAC | |
| | AAA | |
| R3055_ | GCTGGGGACCGATCCTGA | 621 |
| Cas | TTGCTCGCTGCGGCGAGA | |
| Phi32 | CGTGACACATTTGTTTGA | |
| | GAA | |
| R3056_ | GCTGGGGACCGATCCTGA | 622 |
| Cas | TTGCTCGCTGCGGCGAGA | |
| Phi32 | CCTTTGTGACACATTTGT | |
| | TTG | |
| R3057_ | GCTGGGGACCGATCCTGA | 623 |
| Cas | TTGCTCGCTGCGGCGAGA | |
| Phi32 | CTGATGTGTATATCACAG | |
| | ACA | |
| R3058_ | GCTGGGGACCGATCCTGA | 624 |
| Cas | TTGCTCGCTGCGGCGAGA | |
| Phi32 | CTCTGTGATATACACATC | |
| | AGA | |
| R3059_ | GCTGGGGACCGATCCTGA | 625 |
| Cas | TTGCTCGCTGCGGCGAGA | |
| Phi32 | CGTCTGTGATATACACAT | |
| | CAG | |
| R3060_ | GCTGGGGACCGATCCTGA | 626 |
| Cas | TTGCTCGCTGCGGCGAGA | |
| Phi32 | CTGTCTGTGATATACACA | |
| | TCA | |
| R3061_ | GCTGGGGACCGATCCTGA | 627 |
| Cas | TTGCTCGCTGCGGCGAGA | |
| Phi32 | CAAGTCCATAGACCTCAT | |
| | GTC | |
| R3062_ | GCTGGGGACCGATCCTGA | 628 |
| Cas | TTGCTCGCTGCGGCGAGA | |
| Phi32 | CCTCTTGAAGTCCATAGA | |
| | CCT | |
| R3063_ | GCTGGGGACCGATCCTGA | 629 |
| Cas | TTGCTCGCTGCGGCGAGA | |
| Phi32 | CAAGAGCAACAGTGCTGT | |
| | GGC | |
| R3064_ | GCTGGGGACCGATCCTGA | 630 |
| Cas | TTGCTCGCTGCGGCGAGA | |
| Phi32 | CCTCCAGGCCACAGCACT | |
| | GTT | |
| R3065_ | GCTGGGGACCGATCCTGA | 631 |
| Cas | TTGCTCGCTGCGGCGAGA | |
| Phi32 | CTTGCTCCAGGCCACAGC | |
| | ACT | |
| R3066_ | GCTGGGGACCGATCCTGA | 632 |
| Cas | TTGCTCGCTGCGGCGAGA | |
| Phi32 | CGTTGCTCCAGGCCACAG | |
| | CAC | |
| R3067_ | GCTGGGGACCGATCCTGA | 633 |
| Cas | TTGCTCGCTGCGGCGAGA | |
| Phi32 | CCACATGCAAAGTCAGAT | |
| | TTG | |
| R3068_ | GCTGGGGACCGATCCTGA | 634 |
| Cas | TTGCTCGCTGCGGCGAGA | |
| Phi32 | CGCACATGCAAAGTCAGA | |
| | TTT | |
| R3069_ | GCTGGGGACCGATCCTGA | 635 |
| Cas | TTGCTCGCTGCGGCGAGA | |
| Phi32 | CGCATGTGCAAACGCCTT | |
| | CAA | |
| R3070_ | GCTGGGGACCGATCCTGA | 636 |
| Cas | TTGCTCGCTGCGGCGAGA | |
| Phi32 | CAAGGCGTTTGCACATGC | |
| | AAA | |
| R3071_ | GCTGGGGACCGATCCTGA | 637 |
| Cas | TTGCTCGCTGCGGCGAGA | |
| Phi32 | CCATGTGCAAACGCCTTC | |
| | AAC | |
| R3072_ | GCTGGGGACCGATCCTGA | 638 |
| Cas | TTGCTCGCTGCGGCGAGA | |
| Phi32 | CTTGAAGGCGTTTGCACA | |
| | TGC | |
| R3073_ | GCTGGGGACCGATCCTGA | 639 |
| Cas | TTGCTCGCTGCGGCGAGA | |
| Phi32 | CAACAACAGCATTATTCC | |
| | AGA | |
| R3074_ | GCTGGGGACCGATCCTGA | 640 |
| Cas | TTGCTCGCTGCGGCGAGA | |
| Phi32 | CTGGAATAATGCTGTTGT | |
| | TGA | |
| R3075_ | GCTGGGGACCGATCCTGA | 641 |
| Cas | TTGCTCGCTGCGGCGAGA | |
| Phi32 | CTTCCAGAAGACACCTTC | |
| | TTC | |
| R3076_ | GCTGGGGACCGATCCTGA | 642 |
| Cas | TTGCTCGCTGCGGCGAGA | |
| Phi32 | CCAGAAGACACCTTCTTC | |
| | CCC | |
| R3077_ | GCTGGGGACCGATCCTGA | 643 |
| Cas | TTGCTCGCTGCGGCGAGA | |
| Phi32 | CCCTGGGCTGGGGAAGAA | |
| | GGT | |
| R3078_ | GCTGGGGACCGATCCTGA | 644 |
| Cas | TTGCTCGCTGCGGCGAGA | |
| Phi32 | CTTCCCCAGCCCAGGTAA | |
| | GGG | |
| R3079_ | GCTGGGGACCGATCCTGA | 645 |
| Cas | TTGCTCGCTGCGGCGAGA | |
| Phi32 | CCCCAGCCCAGGTAAGGG | |
| | CAG | |
| R3080_ | GCTGGGGACCGATCCTGA | 646 |
| Cas | TTGCTCGCTGCGGCGAGA | |
| Phi32 | CTAAAAGGAAAAACAGAC | |
| | ATT | |
| R3081_ | GCTGGGGACCGATCCTGA | 647 |
| Cas | TTGCTCGCTGCGGCGAGA | |
| Phi32 | CCTAAAAGGAAAAACAGA | |
| | CAT | |
| R3082_ | GCTGGGGACCGATCCTGA | 648 |
| Cas | TTGCTCGCTGCGGCGAGA | |
| Phi32 | CTTCCTTTTAGAAAGTTC | |
| | CTG | |
| R3083_ | GCTGGGGACCGATCCTGA | 649 |
| Cas | TTGCTCGCTGCGGCGAGA | |
| Phi32 | CTCCTTTTAGAAAGTTCC | |
| | TGT | |
| R3084_ | GCTGGGGACCGATCCTGA | 650 |
| Cas | TTGCTCGCTGCGGCGAGA | |
| Phi32 | CCCTTTTAGAAAGTTCCT | |
| | GTG | |
| R3085_ | GCTGGGGACCGATCCTGA | 651 |
| Cas | TTGCTCGCTGCGGCGAGA | |
| Phi32 | CCTTTTAGAAAGTTCCTG | |
| | TGA | |
| R3086_ | GCTGGGGACCGATCCTGA | 652 |
| Cas | TTGCTCGCTGCGGCGAGA | |
| Phi32 | CTAGAAAGTTCCTGTGAT | |
| | GTC | |
| R3136_ | GCTGGGGACCGATCCTGA | 653 |
| Cas | TTGCTCGCTGCGGCGAGA | |
| Phi32 | CAGAAAGTTCCTGTGATG | |
| | TCA | |
| R3137_ | GCTGGGGACCGATCCTGA | 654 |
| Cas | TTGCTCGCTGCGGCGAGA | |
| Phi32 | CGAAAGTTCCTGTGATGT | |
| | CAA | |
| R3138_ | GCTGGGGACCGATCCTGA | 655 |
| Cas | TTGCTCGCTGCGGCGAGA | |
| Phi32 | CACATCACAGGAACTTTC | |
| | TAA | |
| R3139_ | GCTGGGGACCGATCCTGA | 656 |
| Cas | TTGCTCGCTGCGGCGAGA | |
| Phi32 | CCTGTGATGTCAAGCTGG | |
| | TCG | |
| R3140_ | GCTGGGGACCGATCCTGA | 657 |
| Cas | TTGCTCGCTGCGGCGAGA | |
| Phi32 | CTCGACCAGCTTGACATC | |
| | ACA | |
| R3141_ | GCTGGGGACCGATCCTGA | 658 |
| Cas | TTGCTCGCTGCGGCGAGA | |
| Phi32 | CCTCGACCAGCTTGACAT | |
| | CAC | |
| R3142_ | GCTGGGGACCGATCCTGA | 659 |
| Cas | TTGCTCGCTGCGGCGAGA | |
| Phi32 | CTCTCGACCAGCTTGACA | |
| | TCA | |
| R3143_ | GCTGGGGACCGATCCTGA | 660 |
| Cas | TTGCTCGCTGCGGCGAGA | |
| Phi32 | CAAAGCTTTTCTCGACCA | |
| | GCT | |
| R3144_ | GCTGGGGACCGATCCTGA | 661 |
| Cas | TTGCTCGCTGCGGCGAGA | |
| Phi32 | CCAAAGCTTTTCTCGACC | |
| | AGC | |
| R3145_ | GCTGGGGACCGATCCTGA | 662 |
| Cas | TTGCTCGCTGCGGCGAGA | |
| Phi32 | CCCTGTTTCAAAGCTTTT | |
| | CTC | |
| R3146_ | GCTGGGGACCGATCCTGA | 663 |
| Cas | TTGCTCGCTGCGGCGAGA | |
| Phi32 | CGAAACAGGTAAGACAGG | |
| | GGT | |
| R3147_ | GCTGGGGACCGATCCTGA | 664 |
| Cas | TTGCTCGCTGCGGCGAGA | |
| Phi32 | CAAACAGGTAAGACAGGG | |
| | GTC | |

TABLE K
CasΦ.12 gRNAs targeting human B2M in T cells

| | Repeat + spacer | |
|---|---|---|
| | RNA Sequence | SEQ |
| | (5′ --> 3′), | ID |
| Name | shown as DNA | NO |
| R3087_ | CTTTCAAGACTAATAGAT | 665 |
| CasP | TGCTCCTTACGAGGAGAC | |
| hi12 | AATATAAGTGGAGGCGTC | |
| | GC | |
| R3088_ | CTTTCAAGACTAATAGAT | 666 |
| CasP | TGCTCCTTACGAGGAGAC | |
| hi12 | ATATAAGTGGAGGCGTCG | |
| | CG | |
| R3089_ | CTTTCAAGACTAATAGAT | 667 |
| CasP | TGCTCCTTACGAGGAGAC | |
| hi12 | AGGAATGCCCGCCAGCGC | |
| | GA | |
| R3090_ | CTTTCAAGACTAATAGAT | 668 |
| CasP | TGCTCCTTACGAGGAGAC | |
| hi12 | CTGAAGCTGACAGCATTC | |
| | GG | |
| R3091_ | CTTTCAAGACTAATAGAT | 669 |
| CasP | TGCTCCTTACGAGGAGAC | |
| hi12 | GGGCCGAGATGTCTCGCT | |
| | CC | |
| R3092_ | CTTTCAAGACTAATAGAT | 670 |
| CasP | TGCTCCTTACGAGGAGAC | |
| hi12 | GCTGTGCTCGCGCTACTC | |
| | TC | |
| R3093_ | CTTTCAAGACTAATAGAT | 671 |
| CasP | TGCTCCTTACGAGGAGAC | |
| hi12 | CTGGCCTGGAGGCTATCC | |
| | AG | |
| R3094_ | CTTTCAAGACTAATAGAT | 672 |
| CasP | TGCTCCTTACGAGGAGAC | |
| hi12 | TGGCCTGGAGGCTATCCA | |
| | GC | |
| R3095_ | CTTTCAAGACTAATAGAT | 673 |
| CasP | TGCTCCTTACGAGGAGAC | |
| hi12 | ATGTGTCTTTTCCCGATA | |
| | TT | |
| R3096_ | CTTTCAAGACTAATAGAT | 674 |
| CasP | TGCTCCTTACGAGGAGAC | |
| hi12 | TCCCGATATTCCTCAGGT | |
| | AC | |
| R3097_ | CTTTCAAGACTAATAGAT | 675 |
| CasP | TGCTCCTTACGAGGAGAC | |
| hi12 | CCCGATATTCCTCAGGTA | |
| | CT | |
| R3098_ | CTTTCAAGACTAATAGAT | 676 |
| CasP | TGCTCCTTACGAGGAGAC | |
| hi12 | CCGATATTCCTCAGGTAC | |
| | TC | |
| R3099_ | CTTTCAAGACTAATAGAT | 677 |
| CasP | TGCTCCTTACGAGGAGAC | |
| hi12 | GAGTACCTGAGGAATATC | |
| | GG | |
| R3100_ | CTTTCAAGACTAATAGAT | 678 |
| CasP | TGCTCCTTACGAGGAGAC | |
| hi12 | GGAGTACCTGAGGAATAT | |
| | CG | |
| R3101_ | CTTTCAAGACTAATAGAT | 679 |
| CasP | TGCTCCTTACGAGGAGAC | |
| hi12 | CTCAGGTACTCCAAAGAT | |
| | TC | |
| R3102_ | CTTTCAAGACTAATAGAT | 680 |
| CasP | TGCTCCTTACGAGGAGAC | |
| hi12 | AGGTTTACTCACGTCATC | |
| | CA | |
| R3103_ | CTTTCAAGACTAATAGAT | 681 |
| CasP | TGCTCCTTACGAGGAGAC | |
| hi12 | ACTCACGTCATCCAGCAG | |
| | AG | |
| R3104_ | CTTTCAAGACTAATAGAT | 682 |
| CasP | TGCTCCTTACGAGGAGAC | |
| hi12 | CTCACGTCATCCAGCAGA | |
| | GA | |
| R3105_ | CTTTCAAGACTAATAGAT | 683 |
| CasP | TGCTCCTTACGAGGAGAC | |
| hi12 | TCTGCTGGATGACGTGAG | |
| | TA | |
| R3106_ | CTTTCAAGACTAATAGAT | 684 |
| CasP | TGCTCCTTACGAGGAGAC | |
| hi12 | CATTCTCTGCTGGATGAC | |
| | GT | |
| R3107_ | CTTTCAAGACTAATAGAT | 685 |
| CasP | TGCTCCTTACGAGGAGAC | |
| hi12 | CCATTCTCTGCTGGATGA | |
| | CG | |
| R3108_ | CTTTCAAGACTAATAGAT | 686 |
| CasP | TGCTCCTTACGAGGAGAC | |
| hi12 | ACTTTCCATTCTCTGCTG | |
| | GA | |
| R3109_ | CTTTCAAGACTAATAGAT | 687 |
| CasP | TGCTCCTTACGAGGAGAC | |
| hi12 | GACTTTCCATTCTCTGCT | |
| | GG | |
| R3110_ | CTTTCAAGACTAATAGAT | 688 |
| CasP | TGCTCCTTACGAGGAGAC | |
| hi12 | AGGAAATTTGACTTTCCA | |
| | TT | |
| R3111_ | CTTTCAAGACTAATAGAT | 689 |
| CasP | TGCTCCTTACGAGGAGAC | |
| hi12 | CCTGAATTGCTATGTGTC | |
| | TG | |
| R3112_ | CTTTCAAGACTAATAGAT | 690 |
| CasP | TGCTCCTTACGAGGAGAC | |
| hi12 | CTGAATTGCTATGTGTCT | |
| | GG | |
| R3113_ | CTTTCAAGACTAATAGAT | 691 |
| CasP | TGCTCCTTACGAGGAGAC | |
| hi12 | CTATGTGTCTGGGTTTCA | |
| | TC | |
| R3114_ | CTTTCAAGACTAATAGAT | 692 |
| CasP | TGCTCCTTACGAGGAGAC | |
| hi12 | AATGTCGGATGGATGAAA | |
| | CC | |
| R3115_ | CTTTCAAGACTAATAGAT | 693 |
| CasP | TGCTCCTTACGAGGAGAC | |
| hi12 | CATCCATCCGACATTGAA | |
| | GT | |
| R3116_ | CTTTCAAGACTAATAGAT | 694 |
| CasP | TGCTCCTTACGAGGAGAC | |
| hi12 | ATCCATCCGACATTGAAG | |
| | TT | |
| R3117_ | CTTTCAAGACTAATAGAT | 695 |
| CasP | TGCTCCTTACGAGGAGAC | |
| hi12 | AGTAAGTCAACTTCAATG | |
| | TC | |
| R3118_ | CTTTCAAGACTAATAGAT | 696 |
| CasP | TGCTCCTTACGAGGAGAC | |
| hi12 | TTCAGTAAGTCAACTTCA | |
| | AT | |
| R3119_ | CTTTCAAGACTAATAGAT | 697 |
| CasP | TGCTCCTTACGAGGAGAC | |
| hi12 | AAGTTGACTTACTGAAGA | |
| | AT | |
| R3120_ | CTTTCAAGACTAATAGAT | 698 |
| CasP | TGCTCCTTACGAGGAGAC | |
| hi12 | ACTTACTGAAGAATGGAG | |
| | AG | |
| R3121_ | CTTTCAAGACTAATAGAT | 699 |
| CasP | TGCTCCTTACGAGGAGAC | |
| hi12 | TCTCTCCATTCTTCAGTA | |
| | AG | |
| R3122_ | CTTTCAAGACTAATAGAT | 700 |
| CasP | TGCTCCTTACGAGGAGAC | |
| hi12 | CTGAAGAATGGAGAGAGA | |
| | AT | |
| R3123_ | CTTTCAAGACTAATAGAT | 701 |
| CasP | TGCTCCTTACGAGGAGAC | |
| hi12 | AATTCTCTCTCCATTCTT | |
| | CA | |
| R3124_ | CTTTCAAGACTAATAGAT | 702 |
| CasP | TGCTCCTTACGAGGAGAC | |
| hi12 | CAATTCTCTCTCCATTCT | |
| | TC | |
| R3125_ | CTTTCAAGACTAATAGAT | 703 |
| CasP | TGCTCCTTACGAGGAGAC | |
| hi12 | TCAATTCTCTCTCCATTC | |
| | TT | |
| R3126_ | CTTTCAAGACTAATAGAT | 704 |
| CasP | TGCTCCTTACGAGGAGAC | |
| hi12 | TTCAATTCTCTCTCCATT | |
| | CT | |
| R3127_ | CTTTCAAGACTAATAGAT | 705 |
| CasP | TGCTCCTTACGAGGAGAC | |
| hi12 | AAAAAGTGGAGCATTCAG | |
| | AC | |
| R3128_ | CTTTCAAGACTAATAGAT | 706 |
| CasP | TGCTCCTTACGAGGAGAC | |
| hi12 | CTGAAAGACAAGTCTGAA | |
| | TG | |
| R3129_ | CTTTCAAGACTAATAGAT | 707 |
| CasP | TGCTCCTTACGAGGAGAC | |
| hi12 | AGACTTGTCTTTCAGCAA | |
| | GG | |
| R3130_ | CTTTCAAGACTAATAGAT | 708 |
| CasP | TGCTCCTTACGAGGAGAC | |
| hi12 | TCTTTCAGCAAGGACTGG | |
| | TC | |
| R3131_ | CTTTCAAGACTAATAGAT | 709 |
| CasP | TGCTCCTTACGAGGAGAC | |
| hi12 | CAGCAAGGACTGGTCTTT | |
| | CT | |
| R3132_ | CTTTCAAGACTAATAGAT | 710 |
| CasP | TGCTCCTTACGAGGAGAC | |
| hi12 | AGCAAGGACTGGTCTTTC | |
| | TA | |
| R3133_ | CTTTCAAGACTAATAGAT | 711 |
| CasP | TGCTCCTTACGAGGAGAC | |
| hi12 | CTATCTCTTGTACTACAC | |
| | TG | |
| R3134_ | CTTTCAAGACTAATAGAT | 712 |
| CasP | TGCTCCTTACGAGGAGAC | |
| hi12 | TATCTCTTGTACTACACT | |
| | GA | |
| R3135_ | CTTTCAAGACTAATAGAT | 713 |
| CasP | TGCTCCTTACGAGGAGAC | |
| hi12 | AGTGTAGTACAAGAGATA | |
| | GA | |
| R3148_ | CTTTCAAGACTAATAGAT | 714 |
| CasP | TGCTCCTTACGAGGAGAC | |
| hi12 | TACTACACTGAATTCACC | |
| | CC | |
| R3149_ | CTTTCAAGACTAATAGAT | 715 |
| CasP | TGCTCCTTACGAGGAGAC | |
| hi12 | AGTGGGGGTGAATTCAGT | |
| | GT | |
| R3150_ | CTTTCAAGACTAATAGAT | 716 |
| CasP | TGCTCCTTACGAGGAGAC | |
| hi12 | CAGTGGGGGTGAATTCAG | |
| | TG | |
| R3151_ | CTTTCAAGACTAATAGAT | 717 |
| CasP | TGCTCCTTACGAGGAGAC | |
| hi12 | TCAGTGGGGGTGAATTCA | |
| | GT | |
| R3152_ | CTTTCAAGACTAATAGAT | 718 |
| CasP | TGCTCCTTACGAGGAGAC | |
| hi12 | TTCAGTGGGGGTGAATTC | |
| | AG | |
| R3153_ | CTTTCAAGACTAATAGAT | 719 |
| CasP | TGCTCCTTACGAGGAGAC | |
| hi12 | ACCCCCACTGAAAAAGAT | |
| | GA | |
| R3154_ | CTTTCAAGACTAATAGAT | 720 |
| CasP | TGCTCCTTACGAGGAGAC | |
| hi12 | ACACGGCAGGCATACTCA | |
| | TC | |
| R3155_ | CTTTCAAGACTAATAGAT | 721 |
| CasP | TGCTCCTTACGAGGAGAC | |
| hi12 | GGCTGTGACAAAGTCACA | |
| | TG | |
| R3156_ | CTTTCAAGACTAATAGAT | 722 |
| CasP | TGCTCCTTACGAGGAGAC | |
| hi12 | GTCACAGCCCAAGATAGT | |
| | TA | |
| R3157_ | CTTTCAAGACTAATAGAT | 723 |
| CasP | TGCTCCTTACGAGGAGAC | |
| hi12 | TCACAGCCCAAGATAGTT | |
| | AA | |
| R3158_ | CTTTCAAGACTAATAGAT | 724 |
| CasP | TGCTCCTTACGAGGAGAC | |
| hi12 | ACTATCTTGGGCTGTGAC | |
| | AA | |
| R3159_ | CTTTCAAGACTAATAGAT | 725 |
| CasP | TGCTCCTTACGAGGAGAC | |
| hi12 | CCCCACTTAACTATCTTG | |
| | GG | |

TABLE L
CasΦ.32 gRNAs targeting human B2M in T cells

| | Repeat + spacer | |
|---|---|---|
| | RNA Sequence | SEQ |
| | (5′ --> 3′), | ID |
| Name | shown as DNA | NO |
| R3087_ | GCTGGGGACCGATCCTGA | 726 |
| CasP | TTGCTCGCTGCGGCGAGA | |
| hi32 | CAATATAAGTGGAGGCGT | |
| | CGC | |
| R3088_ | GCTGGGGACCGATCCTGA | 727 |
| CasP | TTGCTCGCTGCGGCGAGA | |
| hi32 | CATATAAGTGGAGGCGTC | |
| | GCG | |
| R3089_ | GCTGGGGACCGATCCTGA | 728 |
| CasP | TTGCTCGCTGCGGCGAGA | |
| hi32 | CAGGAATGCCCGCCAGCG | |
| | CGA | |
| R3090_ | GCTGGGGACCGATCCTGA | 729 |
| CasP | TTGCTCGCTGCGGCGAGA | |
| hi32 | CCTGAAGCTGACAGCATT | |
| | CGG | |
| R3091_ | GCTGGGGACCGATCCTGA | 730 |
| CasP | TTGCTCGCTGCGGCGAGA | |
| hi32 | CGGGCCGAGATGTCTCGC | |
| | TCC | |
| R3092_ | GCTGGGGACCGATCCTGA | 731 |
| CasP | TTGCTCGCTGCGGCGAGA | |
| hi32 | CGCTGTGCTCGCGCTACT | |
| | CTC | |
| R3093_ | GCTGGGGACCGATCCTGA | 732 |
| CasP | TTGCTCGCTGCGGCGAGA | |
| hi32 | CCTGGCCTGGAGGCTATC | |
| | CAG | |
| R3094_ | GCTGGGGACCGATCCTGA | 733 |
| CasP | TTGCTCGCTGCGGCGAGA | |
| hi32 | CTGGCCTGGAGGCTATCC | |
| | AGC | |
| R3095_ | GCTGGGGACCGATCCTGA | 734 |
| CasP | TTGCTCGCTGCGGCGAGA | |
| hi32 | CATGTGTCTTTTCCCGAT | |
| | ATT | |
| R3096_ | GCTGGGGACCGATCCTGA | 735 |
| CasP | TTGCTCGCTGCGGCGAGA | |
| hi32 | CTCCCGATATTCCTCAGG | |
| | TAC | |
| R3097_ | GCTGGGGACCGATCCTGA | 736 |
| CasP | TTGCTCGCTGCGGCGAGA | |
| hi32 | CCCCGATATTCCTCAGGT | |
| | ACT | |
| R3098_ | GCTGGGGACCGATCCTGA | 737 |
| CasP | TTGCTCGCTGCGGCGAGA | |
| hi32 | CCCGATATTCCTCAGGTA | |
| | CTC | |
| R3099_ | GCTGGGGACCGATCCTGA | 738 |
| CasP | TTGCTCGCTGCGGCGAGA | |
| hi32 | CGAGTACCTGAGGAATAT | |
| | CGG | |
| R3100_ | GCTGGGGACCGATCCTGA | 739 |
| CasP | TTGCTCGCTGCGGCGAGA | |
| hi32 | CGGAGTACCTGAGGAATA | |
| | TCG | |
| R3101_ | GCTGGGGACCGATCCTGA | 740 |
| CasP | TTGCTCGCTGCGGCGAGA | |
| hi32 | CCTCAGGTACTCCAAAGA | |
| | TTC | |
| R3102_ | GCTGGGGACCGATCCTGA | 741 |
| CasP | TTGCTCGCTGCGGCGAGA | |
| hi32 | CAGGTTTACTCACGTCAT | |
| | CCA | |
| R3103_ | GCTGGGGACCGATCCTGA | 742 |
| CasP | TTGCTCGCTGCGGCGAGA | |
| hi32 | CACTCACGTCATCCAGCA | |
| | GAG | |
| R3104_ | GCTGGGGACCGATCCTGA | 743 |
| CasP | TTGCTCGCTGCGGCGAGA | |
| hi32 | CCTCACGTCATCCAGCAG | |
| | AGA | |
| R3105_ | GCTGGGGACCGATCCTGA | 744 |
| CasP | TTGCTCGCTGCGGCGAGA | |
| hi32 | CTCTGCTGGATGACGTGA | |
| | GTA | |
| R3106_ | GCTGGGGACCGATCCTGA | 745 |
| CasP | TTGCTCGCTGCGGCGAGA | |
| hi32 | CCATTCTCTGCTGGATGA | |
| | CGT | |
| R3107_ | GCTGGGGACCGATCCTGA | 746 |
| CasP | TTGCTCGCTGCGGCGAGA | |
| hi32 | CCCATTCTCTGCTGGATG | |
| | ACG | |
| R3108_ | GCTGGGGACCGATCCTGA | 747 |
| CasP | TTGCTCGCTGCGGCGAGA | |
| hi32 | CACTTTCCATTCTCTGCT | |
| | GGA | |
| R3109_ | GCTGGGGACCGATCCTGA | 748 |
| CasP | TTGCTCGCTGCGGCGAGA | |
| hi32 | CGACTTTCCATTCTCTGC | |
| | TGG | |
| R3110_ | GCTGGGGACCGATCCTGA | 749 |
| CasP | TTGCTCGCTGCGGCGAGA | |
| hi32 | CAGGAAATTTGACTTTCC | |
| | ATT | |
| R3111_ | GCTGGGGACCGATCCTGA | 750 |
| CasP | TTGCTCGCTGCGGCGAGA | |
| hi32 | CCCTGAATTGCTATGTGT | |
| | CTG | |
| R3112_ | GCTGGGGACCGATCCTGA | 751 |
| CasP | TTGCTCGCTGCGGCGAGA | |
| hi32 | CCTGAATTGCTATGTGTC | |
| | TGG | |
| R3113_ | GCTGGGGACCGATCCTGA | 752 |
| CasP | TTGCTCGCTGCGGCGAGA | |
| hi32 | CCTATGTGTCTGGGTTTC | |
| | ATC | |
| R3114_ | GCTGGGGACCGATCCTGA | 753 |
| CasP | TTGCTCGCTGCGGCGAGA | |
| hi32 | CAATGTCGGATGGATGAA | |
| | ACC | |
| R3115_ | GCTGGGGACCGATCCTGA | 754 |
| CasP | TTGCTCGCTGCGGCGAGA | |
| hi32 | CCATCCATCCGACATTGA | |
| | AGT | |
| R3116_ | GCTGGGGACCGATCCTGA | 755 |
| CasP | TTGCTCGCTGCGGCGAGA | |
| hi32 | CATCCATCCGACATTGAA | |
| | GTT | |
| R3117_ | GCTGGGGACCGATCCTGA | 756 |
| CasP | TTGCTCGCTGCGGCGAGA | |
| hi32 | CAGTAAGTCAACTTCAAT | |
| | GTC | |
| R3118_ | GCTGGGGACCGATCCTGA | 757 |
| CasP | TTGCTCGCTGCGGCGAGA | |
| hi32 | CTTCAGTAAGTCAACTTC | |
| | AAT | |
| R3119_ | GCTGGGGACCGATCCTGA | 758 |
| CasP | TTGCTCGCTGCGGCGAGA | |
| hi32 | CAAGTTGACTTACTGAAG | |
| | AAT | |
| R3120_ | GCTGGGGACCGATCCTGA | 759 |
| CasP | TTGCTCGCTGCGGCGAGA | |
| hi32 | CACTTACTGAAGAATGGA | |
| | GAG | |
| R3121_ | GCTGGGGACCGATCCTGA | 760 |
| CasP | TTGCTCGCTGCGGCGAGA | |
| hi32 | CTCTCTCCATTCTTCAGT | |
| | AAG | |
| R3122_ | GCTGGGGACCGATCCTGA | 761 |
| CasP | TTGCTCGCTGCGGCGAGA | |
| hi32 | CCTGAAGAATGGAGAGAG | |
| | AAT | |
| R3123_ | GCTGGGGACCGATCCTGA | 762 |
| CasP | TTGCTCGCTGCGGCGAGA | |
| hi32 | CAATTCTCTCTCCATTCT | |
| | TCA | |
| R3124_ | GCTGGGGACCGATCCTGA | 763 |
| CasP | TTGCTCGCTGCGGCGAGA | |
| hi32 | CCAATTCTCTCTCCATTC | |
| | TTC | |
| R3125_ | GCTGGGGACCGATCCTGA | 764 |
| CasP | TTGCTCGCTGCGGCGAGA | |
| hi32 | CTCAATTCTCTCTCCATT | |
| | CTT | |
| R3126_ | GCTGGGGACCGATCCTGA | 765 |
| CasP | TTGCTCGCTGCGGCGAGA | |
| hi32 | CTTCAATTCTCTCTCCAT | |
| | TCT | |
| R3127_ | GCTGGGGACCGATCCTGA | 766 |
| CasP | TTGCTCGCTGCGGCGAGA | |
| hi32 | CAAAAAGTGGAGCATTCA | |
| | GAC | |
| R3128_ | GCTGGGGACCGATCCTGA | 767 |
| CasP | TTGCTCGCTGCGGCGAGA | |
| hi32 | CCTGAAAGACAAGTCTGA | |
| | ATG | |
| R3129_ | GCTGGGGACCGATCCTGA | 768 |
| CasP | TTGCTCGCTGCGGCGAGA | |
| hi32 | CAGACTTGTCTTTCAGCA | |
| | AGG | |
| R3130_ | GCTGGGGACCGATCCTGA | 769 |
| CasP | TTGCTCGCTGCGGCGAGA | |
| hi32 | CTCTTTCAGCAAGGACTG | |
| | GTC | |
| R3131_ | GCTGGGGACCGATCCTGA | 770 |
| CasP | TTGCTCGCTGCGGCGAGA | |
| hi32 | CCAGCAAGGACTGGTCTT | |
| | TCT | |
| R3132_ | GCTGGGGACCGATCCTGA | 771 |
| CasP | TTGCTCGCTGCGGCGAGA | |
| hi32 | CAGCAAGGACTGGTCTTT | |
| | CTA | |
| R3133_ | GCTGGGGACCGATCCTGA | 772 |
| CasP | TTGCTCGCTGCGGCGAGA | |
| hi32 | CCTATCTCTTGTACTACA | |
| | CTG | |
| R3134_ | GCTGGGGACCGATCCTGA | 773 |
| CasP | TTGCTCGCTGCGGCGAGA | |
| hi32 | CTATCTCTTGTACTACAC | |
| | TGA | |
| R3135_ | GCTGGGGACCGATCCTGA | 774 |
| CasP | TTGCTCGCTGCGGCGAGA | |
| hi32 | CAGTGTAGTACAAGAGAT | |
| | AGA | |
| R3148_ | GCTGGGGACCGATCCTGA | 775 |
| CasP | TTGCTCGCTGCGGCGAGA | |
| hi32 | CTACTACACTGAATTCAC | |
| | CCC | |
| R3149_ | GCTGGGGACCGATCCTGA | 776 |
| CasP | TTGCTCGCTGCGGCGAGA | |
| hi32 | CAGTGGGGGTGAATTCAG | |
| | TGT | |
| R3150_ | GCTGGGGACCGATCCTGA | 777 |
| CasP | TTGCTCGCTGCGGCGAGA | |
| hi32 | CCAGTGGGGGTGAATTCA | |
| | GTG | |
| R3151_ | GCTGGGGACCGATCCTGA | 778 |
| CasP | TTGCTCGCTGCGGCGAGA | |
| hi32 | CTCAGTGGGGGTGAATTC | |
| | AGT | |
| R3152_ | GCTGGGGACCGATCCTGA | 779 |
| CasP | TTGCTCGCTGCGGCGAGA | |
| hi32 | CTTCAGTGGGGGTGAATT | |
| | CAG | |
| R3153_ | GCTGGGGACCGATCCTGA | 780 |
| CasP | TTGCTCGCTGCGGCGAGA | |
| hi32 | CACCCCCACTGAAAAAGA | |
| | TGA | |
| R3154_ | GCTGGGGACCGATCCTGA | 781 |
| CasP | TTGCTCGCTGCGGCGAGA | |
| hi32 | CACACGGCAGGCATACTC | |
| | ATC | |
| R3155_ | GCTGGGGACCGATCCTGA | 782 |
| CasP | TTGCTCGCTGCGGCGAGA | |
| hi32 | CGGCTGTGACAAAGTCAC | |
| | ATG | |
| R3156_ | GCTGGGGACCGATCCTGA | 783 |
| CasP | TTGCTCGCTGCGGCGAGA | |
| hi32 | CGTCACAGCCCAAGATAG | |
| | TTA | |
| R3157_ | GCTGGGGACCGATCCTGA | 784 |
| CasP | TTGCTCGCTGCGGCGAGA | |
| hi32 | CTCACAGCCCAAGATAGT | |
| | TAA | |
| R3158_ | GCTGGGGACCGATCCTGA | 785 |
| CasP | TTGCTCGCTGCGGCGAGA | |
| hi32 | CACTATCTTGGGCTGTGA | |
| | CAA | |
| R3159_ | GCTGGGGACCGATCCTGA | 786 |
| CasP | TTGCTCGCTGCGGCGAGA | |
| hi32 | CCCCCACTTAACTATCTT | |
| | GGG | |

TABLE M
CasΦ.12 gRNAs targeting human PDI in T cells

| | Repeat + spacer | SEQ |
|---|---|---|
| | RNA Sequence | ID |
| Name | (5′ --> 3′) | NO |
| R2921_ | CUUUCAAGACUAAUAGAU | 787 |
| CasP | UGCUCCUUACGAGGAG | |
| hi12 | ACCCUUCCGCUCACCUCC | |
| | GCCU | |
| R2922_ | CUUUCAAGACUAAUAGAU | 788 |
| CasP | UGCUCCUUACGAGGAG | |
| hi12 | ACCCUUCCGCUCACCUCC | |
| | GCCU | |
| R2923_ | CUUUCAAGACUAAUAGAU | 789 |
| CasP | UGCUCCUUACGAGGAG | |
| hi12 | ACCGCUCACCUCCGCCUG | |
| | AGCA | |
| R2924_ | CUUUCAAGACUAAUAGAU | 790 |
| CasP | UGCUCCUUACGAGGAG | |
| hi12 | ACUCCACUGCUCAGGCGG | |
| | AGGU | |
| R2925_ | CUUUCAAGACUAAUAGAU | 791 |
| CasP | UGCUCCUUACGAGGAG | |
| hi12 | ACUAGCACCGCCCAGACG | |
| | ACUG | |
| R2926_ | CUUUCAAGACUAAUAGAU | 792 |
| CasP | UGCUCCUUACGAGGAG | |
| hi12 | ACAGGCAUGCAGAUCCCA | |
| | CAGG | |
| R2927_ | CUUUCAAGACUAAUAGAU | 793 |
| CasP | UGCUCCUUACGAGGAG | |
| hi12 | ACCACAGGCGCCCUGGCC | |
| | AGUC | |
| R2928_ | CUUUCAAGACUAAUAGAU | 794 |
| CasP | UGCUCCUUACGAGGAG | |
| hi12 | ACUCUGGGCGGUGCUACA | |
| | ACUG | |
| R2929_ | CUUUCAAGACUAAUAGAU | 795 |
| CasP | UGCUCCUUACGAGGAG | |
| hi12 | ACGCAUGCCUGGAGCAGC | |
| | CCCA | |
| R2930_ | CUUUCAAGACUAAUAGAU | 796 |
| CasP | UGCUCCUUACGAGGAG | |
| hi12 | ACUAGCACCGCCCAGACG | |
| | ACUG | |
| R2931_ | CUUUCAAGACUAAUAGAU | 797 |
| CasP | UGCUCCUUACGAGGAG | |
| hi12 | ACUGGCCGCCAGCCCAGU | |
| | UGUA | |
| R2932_ | CUUUCAAGACUAAUAGAU | 798 |
| CasP | UGCUCCUUACGAGGAG | |
| hi12 | ACCUUCCGCUCACCUCCG | |
| | CCUG | |
| R2933_ | CUUUCAAGACUAAUAGAU | 799 |
| CasP | UGCUCCUUACGAGGAG | |
| hi12 | ACCAGGGCCUGUCUGGGG | |
| | AGUC | |
| R2934_ | CUUUCAAGACUAAUAGAU | 800 |
| CasP | UGCUCCUUACGAGGAG | |
| hi12 | ACUCCCCAGCCCUGCUCG | |
| | UGGU | |
| R2935_ | CUUUCAAGACUAAUAGAU | 801 |
| CasP | UGCUCCUUACGAGGAG | |
| hi12 | ACGGUCACCACGAGCAGG | |
| | GCUG | |
| R2936_ | CUUUCAAGACUAAUAGAU | 802 |
| CasP | UGCUCCUUACGAGGAG | |
| hi12 | ACUCCCCUUCGGUCACCA | |
| | CGAG | |
| R2937_ | CUUUCAAGACUAAUAGAU | 803 |
| CasP | UGCUCCUUACGAGGAG | |
| hi12 | ACGAGAAGCUGCAGGUGA | |
| | AGGU | |
| R2938_ | CUUUCAAGACUAAUAGAU | 804 |
| CasP | UGCUCCUUACGAGGAG | |
| hi12 | ACACCUGCAGCUUCUCCA | |
| | ACAC | |
| R2939_ | CUUUCAAGACUAAUAGAU | 805 |
| CasP | UGCUCCUUACGAGGAG | |
| hi12 | ACUCCAACACAUCGGAGA | |
| | GCUU | |
| R2940_ | CUUUCAAGACUAAUAGAU | 806 |
| CasP | UGCUCCUUACGAGGAG | |
| hi12 | ACGCACGAAGCUCUCCGA | |
| | UGUG | |
| R2941_ | CUUUCAAGACUAAUAGAU | 807 |
| CasP | UGCUCCUUACGAGGAG | |
| hi12 | ACAGCACGAAGCUCUCCG | |
| | AUGU | |
| R2942_ | CUUUCAAGACUAAUAGAU | 808 |
| CasP | UGCUCCUUACGAGGAG | |
| hi12 | ACGUGCUAAACUGGUACC | |
| | GCAU | |
| R2943_ | CUUUCAAGACUAAUAGAU | 809 |
| CasP | UGCUCCUUACGAGGAG | |
| hi12 | ACCUGGGGCUCAUGCGGU | |
| | ACCA | |
| R2944_ | CUUUCAAGACUAAUAGAU | 810 |
| CasP | UGCUCCUUACGAGGAG | |
| hi12 | ACUCCGUCUGGUUGCUGG | |
| | GGCU | |
| R2945_ | CUUUCAAGACUAAUAGAU | 811 |
| CasP | UGCUCCUUACGAGGAG | |
| hi12 | ACCCCGAGGACCGCAGCC | |
| | AGCC | |
| R2946_ | CUUUCAAGACUAAUAGAU | 812 |
| CasP | UGCUCCUUACGAGGAG | |
| hi12 | ACUGUGACACGGAAGCGG | |
| | CAGU | |
| R2947_ | CUUUCAAGACUAAUAGAU | 813 |
| CasP | UGCUCCUUACGAGGAG | |
| hi12 | ACCGUGUCACACAACUGC | |
| | CCAA | |
| R2948_ | CUUUCAAGACUAAUAGAU | 814 |
| CasP | UGCUCCUUACGAGGAG | |
| hi12 | ACGGCAGUUGUGUGACAC | |
| | GGAA | |
| R2949_ | CUUUCAAGACUAAUAGAU | 815 |
| CasP | UGCUCCUUACGAGGAG | |
| hi12 | ACCACAUGAGCGUGGUCA | |
| | GGGC | |
| R2950_ | CUUUCAAGACUAAUAGAU | 816 |
| CasP | UGCUCCUUACGAGGAG | |
| hi12 | ACCGCCGGGCCCUGACCA | |
| | CGCU | |
| R2951_ | CUUUCAAGACUAAUAGAU | 817 |
| CasP | UGCUCCUUACGAGGAG | |
| hi12 | ACGGGGCCAGGGAGAUGG | |
| | CCCC | |
| R2952_ | CUUUCAAGACUAAUAGAU | 818 |
| CasP | UGCUCCUUACGAGGAG | |
| hi12 | ACAUCUGCGCCUUGGGGG | |
| | CCAG | |
| R2953_ | CUUUCAAGACUAAUAGAU | 819 |
| CasP | UGCUCCUUACGAGGAG | |
| hi12 | ACGAUCUGCGCCUUGGGG | |
| | GCCA | |
| R2954_ | CUUUCAAGACUAAUAGAU | 820 |
| CasP | UGCUCCUUACGAGGAG | |
| hi12 | ACCCAGACAGGCCCUGGA | |
| | ACCC | |
| R2955_ | CUUUCAAGACUAAUAGAU | 821 |
| CasP | UGCUCCUUACGAGGAG | |
| hi12 | ACCCAGCCCUGCUCGUGG | |
| | UGAC | |
| R2956_ | CUUUCAAGACUAAUAGAU | 822 |
| CasP | UGCUCCUUACGAGGAG | |
| hi12 | ACUCUCUGGAAGGGCACA | |
| | AAGG | |
| R2957_ | CUUUCAAGACUAAUAGAU | 823 |
| CasP | UGCUCCUUACGAGGAG | |
| hi12 | ACGUGCCCUUCCAGAGAG | |
| | AAGG | |
| R2958_ | CUUUCAAGACUAAUAGAU | 824 |
| CasP | UGCUCCUUACGAGGAG | |
| hi12 | ACUGCCCUUCCAGAGAGA | |
| | AGGG | |
| R2959_ | CUUUCAAGACUAAUAGAU | 825 |
| CasP | UGCUCCUUACGAGGAG | |
| hi12 | ACUGCCCUUCUCUCUGGA | |
| | AGGG | |
| R2960_ | CUUUCAAGACUAAUAGAU | 826 |
| CasP | UGCUCCUUACGAGGAG | |
| hi12 | ACCAGAGAGAAGGGCAGA | |
| | AGUG | |
| R2961_ | CUUUCAAGACUAAUAGAU | 827 |
| CasP | UGCUCCUUACGAGGAG | |
| hi12 | ACGAACUGGCCGGCUGGC | |
| | CUGG | |
| R2962_ | CUUUCAAGACUAAUAGAU | 828 |
| CasP | UGCUCCUUACGAGGAG | |
| hi12 | ACGGAACUGGCCGGCUGG | |
| | CCUG | |
| R2963_ | CUUUCAAGACUAAUAGAU | 829 |
| CasP | UGCUCCUUACGAGGAG | |
| hi12 | ACCAAACCCUGGUGGUUG | |
| | GUGU | |
| R2964_ | CUUUCAAGACUAAUAGAU | 830 |
| CasP | UGCUCCUUACGAGGAG | |
| hi12 | ACGUGUCGUGGGCGGCCU | |
| | GCUG | |
| R2965_ | CUUUCAAGACUAAUAGAU | 831 |
| CasP | UGCUCCUUACGAGGAG | |
| hi12 | ACCCUCGUGCGGCCCGGG | |
| | AGCA | |
| R2966_ | CUUUCAAGACUAAUAGAU | 832 |
| CasP | UGCUCCUUACGAGGAG | |
| hi12 | ACUCCCUGCAGAGAAACA | |
| | CACU | |
| R2967_ | CUUUCAAGACUAAUAGAU | 833 |
| CasP | UGCUCCUUACGAGGAG | |
| hi12 | ACCUCUGCAGGGACAAUA | |
| | GGAG | |
| R2968_ | CUUUCAAGACUAAUAGAU | 834 |
| CasP | UGCUCCUUACGAGGAG | |
| hi12 | ACUCUGCAGGGACAAUAG | |
| | GAGC | |
| R2969_ | CUUUCAAGACUAAUAGAU | 835 |
| CasP | UGCUCCUUACGAGGAG | |
| hi12 | ACCUCCUCAAAGAAGGAG | |
| | GACC | |
| R2970_ | CUUUCAAGACUAAUAGAU | 836 |
| CasP | UGCUCCUUACGAGGAG | |
| hi12 | ACUCCUCAAAGAAGGAGG | |
| | ACCC | |
| R2971_ | CUUUCAAGACUAAUAGAU | 837 |
| CasP | UGCUCCUUACGAGGAG | |
| hi12 | ACUCUGUGGACUAUGGGG | |
| | AGCU | |
| R2972_ | CUUUCAAGACUAAUAGAU | 838 |
| CasP | UGCUCCUUACGAGGAG | |
| hi12 | ACUCUCGCCACUGGAAAU | |
| | CCAG | |
| R2973_ | CUUUCAAGACUAAUAGAU | 839 |
| CasP | UGCUCCUUACGAGGAG | |
| hi12 | ACCCAGUGGCGAGAGAAG | |
| | ACCC | |
| R2974_ | CUUUCAAGACUAAUAGAU | 840 |
| CasP | UGCUCCUUACGAGGAG | |
| hi12 | ACCAGUGGCGAGAGAAGA | |
| | CCCC | |
| R2975_ | CUUUCAAGACUAAUAGAU | 841 |
| CasP | UGCUCCUUACGAGGAG | |
| hi12 | ACCGCUAGGAAAGACAAU | |
| | GGUG | |
| R2976_ | CUUUCAAGACUAAUAGAU | 842 |
| CasP | UGCUCCUUACGAGGAG | |
| hi12 | ACUCUUUCCUAGCGGAAU | |
| | GGGC | |
| R2977_ | CUUUCAAGACUAAUAGAU | 843 |
| CasP | UGCUCCUUACGAGGAG | |
| hi12 | ACCCUAGCGGAAUGGGCA | |
| | CCUC | |
| R2978_ | CUUUCAAGACUAAUAGAU | 844 |
| CasP | UGCUCCUUACGAGGAG | |
| hi12 | ACCUAGCGGAAUGGGCAC | |
| | CUCA | |
| R2979_ | CUUUCAAGACUAAUAGAU | 845 |
| CasP | UGCUCCUUACGAGGAG | |
| hi12 | ACGCCCCUCUGACCGGCU | |
| | UCCU | |
| R2980_ | CUUUCAAGACUAAUAGAU | 846 |
| CasP | UGCUCCUUACGAGGAG | |
| hi12 | ACCUUGGCCACCAGUGUU | |
| | CUGC | |
| R2981_ | CUUUCAAGACUAAUAGAU | 847 |
| CasP | UGCUCCUUACGAGGAG | |
| hi12 | ACGCCACCAGUGUUCUGC | |
| | AGAC | |
| R2982_ | CUUUCAAGACUAAUAGAU | 848 |
| CasP | UGCUCCUUACGAGGAG | |
| hi12 | ACUGCAGACCCUCCACCA | |
| | UGAG | |
| R2983_ | CUUUCAAGACUAAUAGAU | 849 |
| CasP | UGCUCCUUACGAGGAG | |
| hi12 | ACUCCUGAGGAAAUGCGC | |
| | UGAC | |
| R2984_ | CUUUCAAGACUAAUAGAU | 850 |
| CasP | UGCUCCUUACGAGGAG | |
| hi12 | ACCCUCAGGAGAAGCAGG | |
| | CAGG | |
| R2985_ | CUUUCAAGACUAAUAGAU | 851 |
| CasP | UGCUCCUUACGAGGAG | |
| hi12 | ACCUCAGGAGAAGCAGGC | |
| | AGGG | |
| R2986_ | CUUUCAAGACUAAUAGAU | 852 |
| CasP | UGCUCCUUACGAGGAG | |
| hi12 | ACCAGGCCGUCCAGGGGC | |
| | UGAG | |
| R2987_ | CUUUCAAGACUAAUAGAU | 853 |
| CasP | UGCUCCUUACGAGGAG | |
| hi12 | ACAGACAUGAGUCCUGUG | |
| | GUGG | |
| R2988_ | CUUUCAAGACUAAUAGAU | 854 |
| CasP | UGCUCCUUACGAGGAG | |
| hi12 | ACAGGUCCUGCCAGCACA | |
| | GAGC | |
| R2989_ | CUUUCAAGACUAAUAGAU | 855 |
| CasP | UGCUCCUUACGAGGAG | |
| hi12 | ACAGGGAGCUGGACGCAG | |
| | GCAG | |
| R2990_ | CUUUCAAGACUAAUAGAU | 856 |
| CasP | UGCUCCUUACGAGGAG | |
| hi12 | ACAGCCCCGGGCCGCAGG | |
| | CAGC | |
| R2991_ | CUUUCAAGACUAAUAGAU | 857 |
| CasP | UGCUCCUUACGAGGAG | |
| hi12 | ACAGGCAGGAGGCUCCGG | |
| | GGCG | |
| R2992_ | CUUUCAAGACUAAUAGAU | 858 |
| CasP | UGCUCCUUACGAGGAG | |
| hi12 | ACGGGGCUGGUUGGAGAU | |
| | GGCC | |
| R2993_ | CUUUCAAGACUAAUAGAU | 859 |
| CasP | UGCUCCUUACGAGGAG | |
| hi12 | ACGAGAUGGCCUUGGAGC | |
| | AGCC | |
| R2994_ | CUUUCAAGACUAAUAGAU | 860 |
| CasP | UGCUCCUUACGAGGAG | |
| hi12 | ACGCUGCUCCAAGGCCAU | |
| | CUCC | |
| R2995_ | CUUUCAAGACUAAUAGAU | 861 |
| CasP | UGCUCCUUACGAGGAG | |
| hi12 | ACGAGCAGCCAAGGUGCC | |
| | CCUG | |
| R2996_ | CUUUCAAGACUAAUAGAU | 862 |
| CasP | UGCUCCUUACGAGGAG | |
| hi12 | ACGGGAUGCCACUGCCAG | |
| | GGGC | |
| R2997_ | CUUUCAAGACUAAUAGAU | 863 |
| CasP | UGCUCCUUACGAGGAG | |
| hi12 | ACCGGGAUGCCACUGCCA | |
| | GGGG | |
| R2998_ | CUUUCAAGACUAAUAGAU | 864 |
| CasP | UGCUCCUUACGAGGAG | |
| hi12 | ACGGCCCUGCGUCCAGGG | |
| | CGUU | |
| R2999_ | CUUUCAAGACUAAUAGAU | 865 |
| CasP | UGCUCCUUACGAGGAG | |
| hi12 | ACUCUGCUCCCUGCAGGC | |
| | CUAG | |
| R3000_ | CUUUCAAGACUAAUAGAU | 866 |
| CasP | UGCUCCUUACGAGGAG | |
| hi12 | ACUCUAGGCCUGCAGGGA | |
| | GCAG | |
| R3001_ | CUUUCAAGACUAAUAGAU | 867 |
| CasP | UGCUCCUUACGAGGAG | |
| hi12 | ACCCUGAAACUUCUCUAG | |
| | GCCU | |
| R3002_ | CUUUCAAGACUAAUAGAU | 868 |
| CasP | UGCUCCUUACGAGGAG | |
| hi12 | ACUGACCUUCCCUGAAAC | |
| | UUCU | |
| R3003_ | CUUUCAAGACUAAUAGAU | 869 |
| CasP | UGCUCCUUACGAGGAG | |
| hi12 | ACCAGGGAAGGUCAGAAG | |
| | AGCU | |
| R3004_ | CUUUCAAGACUAAUAGAU | 870 |
| CasP | UGCUCCUUACGAGGAG | |
| hi12 | ACAGGGAAGGUCAGAAGA | |
| | GCUC | |
| R3005_ | CUUUCAAGACUAAUAGAU | 871 |
| CasP | UGCUCCUUACGAGGAG | |
| hi12 | ACCUGCCCUGCCCACCAC | |
| | AGCC | |
| R3006_ | CUUUCAAGACUAAUAGAU | 872 |
| CasP | UGCUCCUUACGAGGAG | |
| hi12 | ACCCUGCCCUGCCCACCA | |
| | CAGC | |
| R3007_ | CUUUCAAGACUAAUAGAU | 873 |
| CasP | UGCUCCUUACGAGGAG | |
| hi12 | ACACACAUGCCCAGGCAG | |
| | CACC | |
| R3008_ | CUUUCAAGACUAAUAGAU | 874 |
| CasP | UGCUCCUUACGAGGAG | |
| hi12 | ACCACAUGCCCAGGCAGC | |
| | ACCU | |
| R3009_ | CUUUCAAGACUAAUAGAU | 875 |
| CasP | UGCUCCUUACGAGGAG | |
| hi12 | ACCCUGCCCCACAAAGGG | |
| | CCUG | |
| R3010_ | CUUUCAAGACUAAUAGAU | 876 |
| CasP | UGCUCCUUACGAGGAG | |
| hi12 | ACGUGGGGCAGGGAAGCU | |
| | GAGG | |
| R3011_ | CUUUCAAGACUAAUAGAU | 877 |
| CasP | UGCUCCUUACGAGGAG | |
| hi12 | ACUGGGGCAGGGAAGCUG | |
| | AGGC | |
| R3012_ | CUUUCAAGACUAAUAGAU | 878 |
| CasP | UGCUCCUUACGAGGAG | |
| hi12 | ACCUGCCUCAGCUUCCCU | |
| | GCCC | |
| R3013_ | CUUUCAAGACUAAUAGAU | 879 |
| CasP | UGCUCCUUACGAGGAG | |
| hi12 | ACCAGGCCCAGCCAGCAC | |
| | UCUG | |
| R3014_ | CUUUCAAGACUAAUAGAU | 880 |
| CasP | UGCUCCUUACGAGGAG | |
| hi12 | ACAGGCCCAGCCAGCACU | |
| | CUGG | |
| R3015_ | CUUUCAAGACUAAUAGAU | 881 |
| CasP | UGCUCCUUACGAGGAG | |
| hi12 | ACCACCCCAGCCCCUCAC | |
| | ACCA | |
| R3016_ | CUUUCAAGACUAAUAGAU | 882 |
| CasP | UGCUCCUUACGAGGAG | |
| hi12 | ACGGACCGUAGGAUGUCC | |
| | CUCU | |

TABLE N
CasΦ.32 gRNAs targeting human PD1 in T cells

| Name | Repeat + spacer RNA Sequence (5′ --> 3′) | SEQ ID NO |
|---|---|---|
| R2921_ | GCUGGGGACCGAUCCUGAUUGCUCGCUGCGGCGA | 883 |
| CasPhi32 | GACCCUUCCGCUCACCUCCGCCU | |
| R2922_ | GCUGGGGACCGAUCCUGAUUGCUCGCUGCGGCGA | 884 |
| CasPhi32 | GACCCUUCCGCUCACCUCCGCCU | |
| R2923_ | GCUGGGGACCGAUCCUGAUUGCUCGCUGCGGCGA | 885 |
| CasPhi32 | GACCGCUCACCUCCGCCUGAGCA | |
| R2924_ | GCUGGGGACCGAUCCUGAUUGCUCGCUGCGGCGA | 886 |
| CasPhi32 | GACUCCACUGCUCAGGCGGAGGU | |
| R2925_ | GCUGGGGACCGAUCCUGAUUGCUCGCUGCGGCGA | 887 |
| CasPhi32 | GACUAGCACCGCCCAGACGACUG | |
| R2926_ | GCUGGGGACCGAUCCUGAUUGCUCGCUGCGGCGA | 888 |
| CasPhi32 | GACAGGCAUGCAGAUCCCACAGG | |
| R2927_ | GCUGGGGACCGAUCCUGAUUGCUCGCUGCGGCGA | 889 |
| CasPhi32 | GACCACAGGCGCCCUGGCCAGUC | |
| R2928_ | GCUGGGGACCGAUCCUGAUUGCUCGCUGCGGCGA | 890 |
| CasPhi32 | GACUCUGGGCGGUGCUACAACUG | |
| R2929_ | GCUGGGGACCGAUCCUGAUUGCUCGCUGCGGCGA | 891 |
| CasPhi32 | GACGCAUGCCUGGAGCAGCCCCA | |
| R2930_ | GCUGGGGACCGAUCCUGAUUGCUCGCUGCGGCGA | 892 |
| CasPhi32 | GACUAGCACCGCCCAGACGACUG | |
| R2931_ | GCUGGGGACCGAUCCUGAUUGCUCGCUGCGGCGA | 893 |
| CasPhi32 | GACUGGCCGCCAGCCCAGUUGUA | |
| R2932_ | GCUGGGGACCGAUCCUGAUUGCUCGCUGCGGCGA | 894 |
| CasPhi32 | GACCUUCCGCUCACCUCCGCCUG | |
| R2933_ | GCUGGGGACCGAUCCUGAUUGCUCGCUGCGGCGA | 895 |
| CasPhi32 | GACCAGGGCCUGUCUGGGGAGUC | |
| R2934_ | GCUGGGGACCGAUCCUGAUUGCUCGCUGCGGCGA | 896 |
| CasPhi32 | GACUCCCCAGCCCUGCUCGUGGU | |
| R2935_ | GCUGGGGACCGAUCCUGAUUGCUCGCUGCGGCGA | 897 |
| CasPhi32 | GACGGUCACCACGAGCAGGGCUG | |
| R2936_ | GCUGGGGACCGAUCCUGAUUGCUCGCUGCGGCGA | 898 |
| CasPhi32 | GACUCCCCUUCGGUCACCACGAG | |
| R2937_ | GCUGGGGACCGAUCCUGAUUGCUCGCUGCGGCGA | 899 |
| CasPhi32 | GACGAGAAGCUGCAGGUGAAGGU | |
| R2938_ | GCUGGGGACCGAUCCUGAUUGCUCGCUGCGGCGA | 900 |
| CasPhi32 | GACACCUGCAGCUUCUCCAACAC | |
| R2939_ | GCUGGGGACCGAUCCUGAUUGCUCGCUGCGGCGA | 901 |
| CasPhi32 | GACUCCAACACAUCGGAGAGCUU | |
| R2940_ | GCUGGGGACCGAUCCUGAUUGCUCGCUGCGGCGA | 902 |
| CasPhi32 | GACGCACGAAGCUCUCCGAUGUG | |
| R2941_ | GCUGGGGACCGAUCCUGAUUGCUCGCUGCGGCGA | 903 |
| CasPhi32 | GACAGCACGAAGCUCUCCGAUGU | |
| R2942_ | GCUGGGGACCGAUCCUGAUUGCUCGCUGCGGCGA | 904 |
| CasPhi32 | GACGUGCUAAACUGGUACCGCAU | |
| R2943_ | GCUGGGGACCGAUCCUGAUUGCUCGCUGCGGCGA | 905 |
| CasPhi32 | GACCUGGGGCUCAUGCGGUACCA | |
| R2944_ | GCUGGGGACCGAUCCUGAUUGCUCGCUGCGGCGA | 906 |
| CasPhi32 | GACUCCGUCUGGUUGCUGGGGCU | |
| R2945_ | GCUGGGGACCGAUCCUGAUUGCUCGCUGCGGCGA | 907 |
| CasPhi32 | GACCCCGAGGACCGCAGCCAGCC | |
| R2946_ | GCUGGGGACCGAUCCUGAUUGCUCGCUGCGGCGA | 908 |
| CasPhi32 | GACUGUGACACGGAAGCGGCAGU | |
| R2947_ | GCUGGGGACCGAUCCUGAUUGCUCGCUGCGGCGA | 909 |
| CasPhi32 | GACCGUGUCACACAACUGCCCAA | |
| R2948_ | GCUGGGGACCGAUCCUGAUUGCUCGCUGCGGCGA | 910 |
| CasPhi32 | GACGGCAGUUGUGUGACACGGAA | |
| R2949_ | GCUGGGGACCGAUCCUGAUUGCUCGCUGCGGCGA | 911 |
| CasPhi32 | GACCACAUGAGCGUGGUCAGGGC | |
| R2950_ | GCUGGGGACCGAUCCUGAUUGCUCGCUGCGGCGA | 912 |
| CasPhi32 | GACCGCCGGGCCCUGACCACGCU | |
| R2951_ | GCUGGGGACCGAUCCUGAUUGCUCGCUGCGGCGA | 913 |
| CasPhi32 | GACGGGGCCAGGGAGAUGGCCCC | |
| R2952_ | GCUGGGGACCGAUCCUGAUUGCUCGCUGCGGCGA | 914 |
| CasPhi32 | GACAUCUGCGCCUUGGGGGCCAG | |
| R2953_ | GCUGGGGACCGAUCCUGAUUGCUCGCUGCGGCGA | 915 |
| CasPhi32 | GACGAUCUGCGCCUUGGGGGCCA | |
| R2954_ | GCUGGGGACCGAUCCUGAUUGCUCGCUGCGGCGA | 916 |
| CasPhi32 | GACCCAGACAGGCCCUGGAACCC | |
| R2955_ | GCUGGGGACCGAUCCUGAUUGCUCGCUGCGGCGA | 917 |
| CasPhi32 | GACCCAGCCCUGCUCGUGGUGAC | |
| R2956_ | GCUGGGGACCGAUCCUGAUUGCUCGCUGCGGCGA | 918 |
| CasPhi32 | GACUCUCUGGAAGGGCACAAAGG | |
| R2957_ | GCUGGGGACCGAUCCUGAUUGCUCGCUGCGGCGA | 919 |
| CasPhi32 | GACGUGCCCUUCCAGAGAGAAGG | |
| R2958_ | GCUGGGGACCGAUCCUGAUUGCUCGCUGCGGCGA | 920 |
| CasPhi32 | GACUGCCCUUCCAGAGAGAAGGG | |
| R2959_ | GCUGGGGACCGAUCCUGAUUGCUCGCUGCGGCGA | 921 |
| CasPhi32 | GACUGCCCUUCUCUCUGGAAGGG | |
| R2960_ | GCUGGGGACCGAUCCUGAUUGCUCGCUGCGGCGA | 922 |
| CasPhi32 | GACCAGAGAGAAGGGCAGAAGUG | |
| R2961_ | GCUGGGGACCGAUCCUGAUUGCUCGCUGCGGCGA | 923 |
| CasPhi32 | GACGAACUGGCCGGCUGGCCUGG | |
| R2962_ | GCUGGGGACCGAUCCUGAUUGCUCGCUGCGGCGA | 924 |
| CasPhi32 | GACGGAACUGGCCGGCUGGCCUG | |
| R2963_ | GCUGGGGACCGAUCCUGAUUGCUCGCUGCGGCGA | 925 |
| CasPhi32 | GACCAAACCCUGGUGGUUGGUGU | |
| R2964_ | GCUGGGGACCGAUCCUGAUUGCUCGCUGCGGCGA | 926 |
| CasPhi32 | GACGUGUCGUGGGCGGCCUGCUG | |
| R2965_ | GCUGGGGACCGAUCCUGAUUGCUCGCUGCGGCGA | 927 |
| CasPhi32 | GACCCUCGUGCGGCCCGGGAGCA | |
| R2966_ | GCUGGGGACCGAUCCUGAUUGCUCGCUGCGGCGA | 928 |
| CasPhi32 | GACUCCCUGCAGAGAAACACACU | |
| R2967_ | GCUGGGGACCGAUCCUGAUUGCUCGCUGCGGCGA | 929 |
| CasPhi32 | GACCUCUGCAGGGACAAUAGGAG | |
| R2968_ | GCUGGGGACCGAUCCUGAUUGCUCGCUGCGGCGA | 930 |
| CasPhi32 | GACUCUGCAGGGACAAUAGGAGC | |
| R2969_ | GCUGGGGACCGAUCCUGAUUGCUCGCUGCGGCGA | 931 |
| CasPhi32 | GACCUCCUCAAAGAAGGAGGACC | |
| R2970_ | GCUGGGGACCGAUCCUGAUUGCUCGCUGCGGCGA | 932 |
| CasPhi32 | GACUCCUCAAAGAAGGAGGACCC | |
| R2971_ | GCUGGGGACCGAUCCUGAUUGCUCGCUGCGGCGA | 933 |
| CasPhi32 | GACUCUGUGGACUAUGGGGAGCU | |
| R2972_ | GCUGGGGACCGAUCCUGAUUGCUCGCUGCGGCGA | 934 |
| CasPhi32 | GACUCUCGCCACUGGAAAUCCAG | |
| R2973_ | GCUGGGGACCGAUCCUGAUUGCUCGCUGCGGCGA | 935 |
| CasPhi32 | GACCCAGUGGCGAGAGAAGACCC | |
| R2974_ | GCUGGGGACCGAUCCUGAUUGCUCGCUGCGGCGA | 936 |
| CasPhi32 | GACCAGUGGCGAGAGAAGACCCC | |
| R2975_ | GCUGGGGACCGAUCCUGAUUGCUCGCUGCGGCGA | 937 |
| CasPhi32 | GACCGCUAGGAAAGACAAUGGUG | |
| R2976_ | GCUGGGGACCGAUCCUGAUUGCUCGCUGCGGCGA | 938 |
| CasPhi32 | GACUCUUUCCUAGCGGAAUGGGC | |
| R2977_ | GCUGGGGACCGAUCCUGAUUGCUCGCUGCGGCGA | 939 |
| CasPhi32 | GACCCUAGCGGAAUGGGCACCUC | |
| R2978_ | GCUGGGGACCGAUCCUGAUUGCUCGCUGCGGCGA | 940 |
| CasPhi32 | GACCUAGCGGAAUGGGCACCUCA | |
| R2979_ | GCUGGGGACCGAUCCUGAUUGCUCGCUGCGGCGA | 941 |
| CasPhi32 | GACGCCCCUCUGACCGGCUUCCU | |
| R2980_ | GCUGGGGACCGAUCCUGAUUGCUCGCUGCGGCGA | 942 |
| CasPhi32 | GACCUUGGCCACCAGUGUUCUGC | |
| R2981_ | GCUGGGGACCGAUCCUGAUUGCUCGCUGCGGCGA | 943 |
| CasPhi32 | GACGCCACCAGUGUUCUGCAGAC | |
| R2982_ | GCUGGGGACCGAUCCUGAUUGCUCGCUGCGGCGA | 944 |
| CasPhi32 | GACUGCAGACCCUCCACCAUGAG | |
| R2983_ | GCUGGGGACCGAUCCUGAUUGCUCGCUGCGGCGA | 945 |
| CasPhi32 | GACUCCUGAGGAAAUGCGCUGAC | |
| R2984_ | GCUGGGGACCGAUCCUGAUUGCUCGCUGCGGCGA | 946 |
| CasPhi32 | GACCCUCAGGAGAAGCAGGCAGG | |
| R2985_ | GCUGGGGACCGAUCCUGAUUGCUCGCUGCGGCGA | 947 |
| CasPhi32 | GACCUCAGGAGAAGCAGGCAGGG | |
| R2986_ | GCUGGGGACCGAUCCUGAUUGCUCGCUGCGGCGA | 948 |
| CasPhi32 | GACCAGGCCGUCCAGGGGCUGAG | |
| R2987_ | GCUGGGGACCGAUCCUGAUUGCUCGCUGCGGCGA | 949 |
| CasPhi32 | GACAGACAUGAGUCCUGUGGUGG | |
| R2988_ | GCUGGGGACCGAUCCUGAUUGCUCGCUGCGGCGA | 950 |
| CasPhi32 | GACAGGUCCUGCCAGCACAGAGC | |
| R2989_ | GCUGGGGACCGAUCCUGAUUGCUCGCUGCGGCGA | 951 |
| CasPhi32 | GACAGGGAGCUGGACGCAGGCAG | |
| R2990_ | GCUGGGGACCGAUCCUGAUUGCUCGCUGCGGCGA | 952 |
| CasPhi32 | GACAGCCCCGGGCCGCAGGCAGC | |
| R2991_ | GCUGGGGACCGAUCCUGAUUGCUCGCUGCGGCGA | 953 |
| CasPhi32 | GACAGGCAGGAGGCUCCGGGGCG | |
| R2992_ | GCUGGGGACCGAUCCUGAUUGCUCGCUGCGGCGA | 954 |
| CasPhi32 | GACGGGGCUGGUUGGAGAUGGCC | |
| R2993_ | GCUGGGGACCGAUCCUGAUUGCUCGCUGCGGCGA | 955 |
| CasPhi32 | GACGAGAUGGCCUUGGAGCAGCC | |
| R2994_ | GCUGGGGACCGAUCCUGAUUGCUCGCUGCGGCGA | 956 |
| CasPhi32 | GACGCUGCUCCAAGGCCAUCUCC | |
| R2995_ | GCUGGGGACCGAUCCUGAUUGCUCGCUGCGGCGA | 957 |
| CasPhi32 | GACGAGCAGCCAAGGUGCCCCUG | |
| R2996_ | GCUGGGGACCGAUCCUGAUUGCUCGCUGCGGCGA | 958 |
| CasPhi32 | GACGGGAUGCCACUGCCAGGGGC | |
| R2997_ | GCUGGGGACCGAUCCUGAUUGCUCGCUGCGGCGA | 959 |
| CasPhi32 | GACCGGGAUGCCACUGCCAGGGG | |
| R2998_ | GCUGGGGACCGAUCCUGAUUGCUCGCUGCGGCGA | 960 |
| CasPhi32 | GACGGCCCUGCGUCCAGGGCGUU | |
| R2999_ | GCUGGGGACCGAUCCUGAUUGCUCGCUGCGGCGA | 961 |
| CasPhi32 | GACUCUGCUCCCUGCAGGCCUAG | |
| R3000_ | GCUGGGGACCGAUCCUGAUUGCUCGCUGCGGCGA | 962 |
| CasPhi32 | GACUCUAGGCCUGCAGGGAGCAG | |
| R3001_ | GCUGGGGACCGAUCCUGAUUGCUCGCUGCGGCGA | 963 |
| CasPhi32 | GACCCUGAAACUUCUCUAGGCCU | |
| R3002_ | GCUGGGGACCGAUCCUGAUUGCUCGCUGCGGCGA | 964 |
| CasPhi32 | GACUGACCUUCCCUGAAACUUCU | |
| R3003_ | GCUGGGGACCGAUCCUGAUUGCUCGCUGCGGCGA | 965 |
| CasPhi32 | GACCAGGGAAGGUCAGAAGAGCU | |
| R3004_ | GCUGGGGACCGAUCCUGAUUGCUCGCUGCGGCGA | 966 |
| CasPhi32 | GACAGGGAAGGUCAGAAGAGCUC | |
| R3005_ | GCUGGGGACCGAUCCUGAUUGCUCGCUGCGGCGA | 967 |
| CasPhi32 | GACCUGCCCUGCCCACCACAGCC | |
| R3006_ | GCUGGGGACCGAUCCUGAUUGCUCGCUGCGGCGA | 968 |
| CasPhi32 | GACCCUGCCCUGCCCACCACAGC | |
| R3007_ | GCUGGGGACCGAUCCUGAUUGCUCGCUGCGGCGA | 969 |
| CasPhi32 | GACACACAUGCCCAGGCAGCACC | |
| R3008_ | GCUGGGGACCGAUCCUGAUUGCUCGCUGCGGCGA | 970 |
| CasPhi32 | GACCACAUGCCCAGGCAGCACCU | |
| R3009_ | GCUGGGGACCGAUCCUGAUUGCUCGCUGCGGCGA | 971 |
| CasPhi32 | GACCCUGCCCCACAAAGGGCCUG | |
| R3010_ | GCUGGGGACCGAUCCUGAUUGCUCGCUGCGGCGA | 972 |
| CasPhi32 | GACGUGGGGCAGGGAAGCUGAGG | |
| R3011_ | GCUGGGGACCGAUCCUGAUUGCUCGCUGCGGCGA | 973 |
| CasPhi32 | GACUGGGGCAGGGAAGCUGAGGC | |
| R3012_ | GCUGGGGACCGAUCCUGAUUGCUCGCUGCGGCGA | 974 |
| CasPhi32 | GACCUGCCUCAGCUUCCCUGCCC | |
| R3013_ | GCUGGGGACCGAUCCUGAUUGCUCGCUGCGGCGA | 975 |
| CasPhi32 | GACCAGGCCCAGCCAGCACUCUG | |
| R3014_ | GCUGGGGACCGAUCCUGAUUGCUCGCUGCGGCGA | 976 |
| CasPhi32 | GACAGGCCCAGCCAGCACUCUGG | |
| R3015_ | GCUGGGGACCGAUCCUGAUUGCUCGCUGCGGCGA | 977 |
| CasPhi32 | GACCACCCCAGCCCCUCACACCA | |
| R3016_ | GCUGGGGACCGAUCCUGAUUGCUCGCUGCGGCGA | 978 |
| CasPhi32 | GACGGACCGUAGGAUGUCCCUCU | |

TABLE O
CasΦ.12 gRNAs targeting human CIITA

| | Repeat + | |
|---|---|---|
| Name | spacer sequence RNA Sequence (5′→3′) | SEQ ID NO |
| R4503_CasPhi12_ | CUUUCAAGACUAAUAGAUUGCUCCUUACGAGG | 979 |
| C2TA_T1.1 | AGACCUACACAAUGCGUUGCCUGG | |
| R4504_CasPhi12_ | CUUUCAAGACUAAUAGAUUGCUCCUUACGAGG | 980 |
| C2TA_T1.2 | AGACGGGCUCUGACAGGUAGGACC | |
| R4505_CasPhi12_ | CUUUCAAGACUAAUAGAUUGCUCCUUACGAGG | 981 |
| C2TA_T1.3 | AGACUGUAGGAAUCCCAGCCAGGC | |
| R4506_CasPhi12_ | CUUUCAAGACUAAUAGAUUGCUCCUUACGAGG | 982 |
| C2TA_T1.8 | AGACCCUGGCUCCACGCCCUGCUG | |
| R4507_CasPhi12_ | CUUUCAAGACUAAUAGAUUGCUCCUUACGAGG | 983 |
| C2TA_T1.9 | AGACGGGAAGCUGAGGGCACGAGG | |
| R4508_CasPhi12_ | CUUUCAAGACUAAUAGAUUGCUCCUUACGAGG | 984 |
| C2TA_T2.1 | AGACACAGCGAUGCUGACCCCCUG | |
| R4509_CasPhi12_ | CUUUCAAGACUAAUAGAUUGCUCCUUACGAGG | 985 |
| C2_TAT2.2 | AGACUUAACAGCGAUGCUGACCCC | |
| R4510_CasPhi12_ | CUUUCAAGACUAAUAGAUUGCUCCUUACGAGG | 986 |
| C2TA_T2.3 | AGACUAUGACCAGAUGGACCUGGC | |
| R4511_CasPhi12_ | CUUUCAAGACUAAUAGAUUGCUCCUUACGAGG | 987 |
| C2TA_T2.4 | AGACGGGCCCCUAGAAGGUGGCUA | |
| R4512_CasPhi12_ | CUUUCAAGACUAAUAGAUUGCUCCUUACGAGG | 988 |
| C2TA_T2.5 | AGACUAGGGGCCCCAACUCCAUGG | |
| R4513_CasPhi12_ | CUUUCAAGACUAAUAGAUUGCUCCUUACGAGG | 989 |
| C2TA_T2.6 | AGACAGAAGCUCCAGGUAGCCACC | |
| R4514_CasPhi12 | CUUUCAAGACUAAUAGAUUGCUCCUUACGAGG | 990 |
| C2TA_T2.7 | AGACUCCAGCCAGGUCCAUCUGGU | |
| R4515_CasPhi12_ | CUUUCAAGACUAAUAGAUUGCUCCUUACGAGG | 991 |
| C2TA_T2.8 | AGACUUCUCCAGCCAGGUCCAUCU | |
| R5200_CasPhi12 | CUUUCAAGACUAAUAGAUUGCUCCUUACGAGG | 2112 |
| | AGACAGCAGGCUGUUGUGUGACAU | |
| R5201_CasPhi12 | CUUUCAAGACUAAUAGAUUGCUCCUUACGAGG | 2113 |
| | AGACCAUGUCACACAACAGCCUGC | |
| R5202_CasPhi12 | CUUUCAAGACUAAUAGAUUGCUCCUUACGAGG | 2114 |
| | AGACUGUGACAUGGAAGGUGAUGA | |
| R5203_CasPhi12 | CUUUCAAGACUAAUAGAUUGCUCCUUACGAGG | 2115 |
| | AGACAUCACCUUCCAUGUCACACA | |
| R5204_CasPhi12 | CUUUCAAGACUAAUAGAUUGCUCCUUACGAGG | 2116 |
| | AGACGCAUAAGCCUCCCUGGUCUC | |
| R5205_CasPhi12 | CUUUCAAGACUAAUAGAUUGCUCCUUACGAGG | 2117 |
| | AGACCAGGACUCCCAGCUGGAGGG | |
| R5206_CasPhi12 | CUUUCAAGACUAAUAGAUUGCUCCUUACGAGG | 2118 |
| | AGACCUCAGGCCCUCCAGCUGGGA | |
| R5207_CasPhi12 | CUUUCAAGACUAAUAGAUUGCUCCUUACGAGG | 2119 |
| | AGACUGCUGGCAUCUCCAUACUCU | |
| R5208_CasPhi12 | CUUUCAAGACUAAUAGAUUGCUCCUUACGAGG | 2120 |
| | AGACUGCCCAACUUCUGCUGGCAU | |
| R5209_CasPhi12 | CUUUCAAGACUAAUAGAUUGCUCCUUACGAGG | 2121 |
| | AGACCUGCCCAACUUCUGCUGGCA | |
| R5210_CasPhi12 | CUUUCAAGACUAAUAGAUUGCUCCUUACGAGG | 2122 |
| | AGACUCUGCCCAACUUCUGCUGGC | |
| R5211_CasPhi12 | CUUUCAAGACUAAUAGAUUGCUCCUUACGAGG | 2123 |
| | AGACUGACUUUUCUGCCCAACUUC | |
| R5212_CasPhi12 | CUUUCAAGACUAAUAGAUUGCUCCUUACGAGG | 2124 |
| | AGACCUGACUUUUCUGCCCAACUU | |
| R5213_CasPhi12 | CUUUCAAGACUAAUAGAUUGCUCCUUACGAGG | 2125 |
| | AGACUCUGACUUUUCUGCCCAACU | |
| R5214_CasPhi12 | CUUUCAAGACUAAUAGAUUGCUCCUUACGAGG | 2126 |
| | AGACCCAGAGGAGCUUCCGGCAGA | |
| R5215_CasPhi12 | CUUUCAAGACUAAUAGAUUGCUCCUUACGAGG | 2127 |
| | AGACAGGUCUGCCGGAAGCUCCUC | |
| R5216_CasPhi12 | CUUUCAAGACUAAUAGAUUGCUCCUUACGAGG | 2128 |
| | AGACCGGCAGACCUGAAGCACUGG | |
| R5217_CasPhi12 | CUUUCAAGACUAAUAGAUUGCUCCUUACGAGG | 2129 |
| | AGACCAGUGCUUCAGGUCUGCCGG | |
| R5218_CasPhi12 | CUUUCAAGACUAAUAGAUUGCUCCUUACGAGG | 2130 |
| | AGACAACAGCGCAGGCAGUGGCAG | |
| R5219_CasPhi12 | CUUUCAAGACUAAUAGAUUGCUCCUUACGAGG | 2131 |
| | AGACAACCAGGAGCCAGCCUCCGG | |
| R5220_CasPhi12 | CUUUCAAGACUAAUAGAUUGCUCCUUACGAGG | 2132 |
| | AGACUCCAGGCGCAUCUGGCCGGA | |
| R5221_CasPhi12 | CUUUCAAGACUAAUAGAUUGCUCCUUACGAGG | 2133 |
| | AGACCUCCAGGCGCAUCUGGCCGG | |
| R5222_CasPhi12 | CUUUCAAGACUAAUAGAUUGCUCCUUACGAGG | 2134 |
| | AGACUCUCCAGGCGCAUCUGGCCG | |
| R5223_CasPhi12 | CUUUCAAGACUAAUAGAUUGCUCCUUACGAGG | 2135 |
| | AGACCUCCAGUUCCUCGUUGAGCU | |
| R5224_CasPhi12 | CUUUCAAGACUAAUAGAUUGCUCCUUACGAGG | 2136 |
| | AGACUCCAGUUCCUCGUUGAGCUG | |
| R5225_CasPhi12 | CUUUCAAGACUAAUAGAUUGCUCCUUACGAGG | 2137 |
| | AGACAGGCAGCUCAACGAGGAACU | |
| R5226_CasPhi12 | CUUUCAAGACUAAUAGAUUGCUCCUUACGAGG | 2138 |
| | AGACCUCGUUGAGCUGCCUGAAUC | |
| R5227_CasPhi12 | CUUUCAAGACUAAUAGAUUGCUCCUUACGAGG | 2139 |
| | AGACAGCUGCCUGAAUCUCCCUGA | |
| R5228_CasPhi12 | CUUUCAAGACUAAUAGAUUGCUCCUUACGAGG | 2140 |
| | AGACGUCCCCACCAUCUCCACUCU | |
| R5229_CasPhi12 | CUUUCAAGACUAAUAGAUUGCUCCUUACGAGG | 2141 |
| | AGACUCCCCACCAUCUCCACUCUG | |
| R5230_CasPhi12 | CUUUCAAGACUAAUAGAUUGCUCCUUACGAGG | 2142 |
| | AGACCCAGAGCCCAUGGGGCAGAG | |
| R5231_CasPhi12 | CUUUCAAGACUAAUAGAUUGCUCCUUACGAGG | 2143 |
| | AGACGCCAGAGCCCAUGGGGCAGA | |
| R5232_CasPhi12 | CUUUCAAGACUAAUAGAUUGCUCCUUACGAGG | 2144 |
| | AGACCAGCCUCAGAGAUUUGCCAG | |
| R5233_CasPhi12 | CUUUCAAGACUAAUAGAUUGCUCCUUACGAGG | 2145 |
| | AGACGGAGGCCGUGGACAGUGAAU | |
| R5234_CasPhi12 | CUUUCAAGACUAAUAGAUUGCUCCUUACGAGG | 2146 |
| | AGACACUGUCCACGGCCUCCCAAC | |
| R5235_CasPhi12 | CUUUCAAGACUAAUAGAUUGCUCCUUACGAGG | 2147 |
| | AGACGCUCCAUCAGCCACUGACCU | |
| R5236_CasPhi12 | CUUUCAAGACUAAUAGAUUGCUCCUUACGAGG | 2148 |
| | AGACAGGCAUGCUGGGCAGGUCAG | |
| R5237_CasPhi12 | CUUUCAAGACUAAUAGAUUGCUCCUUACGAGG | 2149 |
| | AGACCUCGGGAGGUCAGGGCAGGU | |
| R5238_CasPhi12 | CUUUCAAGACUAAUAGAUUGCUCCUUACGAGG | 2150 |
| | AGACGCUCGGGAGGUCAGGGCAGG | |
| R5239_CasPhi12 | CUUUCAAGACUAAUAGAUUGCUCCUUACGAGG | 2151 |
| | AGACGAGACCUCUCCAGCUGCCGG | |
| R5240_CasPhi12 | CUUUCAAGACUAAUAGAUUGCUCCUUACGAGG | 2152 |
| | AGACUUGGAGACCUCUCCAGCUGC | |
| R5241_CasPhi12 | CUUUCAAGACUAAUAGAUUGCUCCUUACGAGG | 2153 |
| | AGACGAAGCUUGUUGGAGACCUCU | |
| R5242_CasPhi12 | CUUUCAAGACUAAUAGAUUGCUCCUUACGAGG | 2154 |
| | AGACGGAAGCUUGUUGGAGACCUC | |
| R5243_CasPhi12 | CUUUCAAGACUAAUAGAUUGCUCCUUACGAGG | 2155 |
| | AGACUGGAAGCUUGUUGGAGACCU | |
| R5244_CasPhi12 | CUUUCAAGACUAAUAGAUUGCUCCUUACGAGG | 2156 |
| | AGACUACCGCUCACUGCAGGACAC | |
| R5245_CasPhi12 | CUUUCAAGACUAAUAGAUUGCUCCUUACGAGG | 2157 |
| | AGACCUGCUGCUCCUCUCCAGCCU | |
| R5246_CasPhi12 | CUUUCAAGACUAAUAGAUUGCUCCUUACGAGG | 2158 |
| | AGACCCGCUCCAGGCUCUUGCUGC | |
| R5247_CasPhi12 | CUUUCAAGACUAAUAGAUUGCUCCUUACGAGG | 2159 |
| | AGACUGCCCAGUCCGGGGUGGCCA | |
| R5248_CasPhi12 | CUUUCAAGACUAAUAGAUUGCUCCUUACGAGG | 2160 |
| | AGACGGCCAGCUGCCGUUCUGCCC | |
| R5249_CasPhi12 | CUUUCAAGACUAAUAGAUUGCUCCUUACGAGG | 2161 |
| | AGACGCAGCCAACAGCACCUCAGC | |
| R5250_CasPhi12 | CUUUCAAGACUAAUAGAUUGCUCCUUACGAGG | 2162 |
| | AGACGCUGCCAAGGAGCACCGGCG | |
| R5251_CasPhi12 | CUUUCAAGACUAAUAGAUUGCUCCUUACGAGG | 2163 |
| | AGACCCCAGCACAGCAAUCACUCG | |
| R5252_CasPhi12 | CUUUCAAGACUAAUAGAUUGCUCCUUACGAGG | 2164 |
| | AGACGCCCAGCACAGCAAUCACUC | |
| R5253_CasPhi12 | CUUUCAAGACUAAUAGAUUGCUCCUUACGAGG | 2165 |
| | AGACCUGUGCUGGGCAAAGCUGGU | |
| R5254_CasPhi12 | CUUUCAAGACUAAUAGAUUGCUCCUUACGAGG | 2166 |
| | AGACCCCUGACCAGCUUUGCCCAG | |
| R5255_CasPhi12 | CUUUCAAGACUAAUAGAUUGCUCCUUACGAGG | 2167 |
| | AGACGGCUGGGGCAGUGAGCCGGG | |
| R5256_CasPhi12 | CUUUCAAGACUAAUAGAUUGCUCCUUACGAGG | 2168 |
| | AGACUGGCCGGCUUCCCCAGUACG | |
| R5257_CasPhi12 | CUUUCAAGACUAAUAGAUUGCUCCUUACGAGG | 2169 |
| | AGACCCCAGUACGACUUUGUCUUC | |
| R5258_CasPhi12 | CUUUCAAGACUAAUAGAUUGCUCCUUACGAGG | 2170 |
| | AGACGUCUUCUCUGUCCCCUGCCA | |
| R5259_CasPhi12 | CUUUCAAGACUAAUAGAUUGCUCCUUACGAGG | 2171 |
| | AGACUCUUCUCUGUCCCCUGCCAU | |
| R5260_CasPhi12 | CUUUCAAGACUAAUAGAUUGCUCCUUACGAGG | 2172 |
| | AGACUCUGUCCCCUGCCAUUGCUU | |
| R5261_CasPhi12 | CUUUCAAGACUAAUAGAUUGCUCCUUACGAGG | 2173 |
| | AGACAAGCAAUGGCAGGGGACAGA | |
| R5262_CasPhi12 | CUUUCAAGACUAAUAGAUUGCUCCUUACGAGG | 2174 |
| | AGACCUUGAACCGUCCGGGGGAUG | |
| R5263_CasPhi12 | CUUUCAAGACUAAUAGAUUGCUCCUUACGAGG | 2175 |
| | AGACAACCGUCCGGGGGAUGCCUA | |
| R5264_CasPhi12 | CUUUCAAGACUAAUAGAUUGCUCCUUACGAGG | 2176 |
| | AGACUCCCUGGGCCCACAGCCACU | |
| R5265_CasPhi12 | CUUUCAAGACUAAUAGAUUGCUCCUUACGAGG | 2177 |
| | AGACAAGAUGUGGCUGAAAACCUC | |
| R5266_CasPhi12 | CUUUCAAGACUAAUAGAUUGCUCCUUACGAGG | 2178 |
| | AGACUCAGCCACAUCUUGAAGAGA | |
| R5267_CasPhi12 | CUUUCAAGACUAAUAGAUUGCUCCUUACGAGG | 2179 |
| | AGACCAGCCACAUCUUGAAGAGAC | |
| R5268_CasPhi12 | CUUUCAAGACUAAUAGAUUGCUCCUUACGAGG | 2180 |
| | AGACAGCCACAUCUUGAAGAGACC | |
| R5269_CasPhi12 | CUUUCAAGACUAAUAGAUUGCUCCUUACGAGG | 2181 |
| | AGACAAGAGACCUGACCGCGUUCU | |
| R5270_CasPhi12 | CUUUCAAGACUAAUAGAUUGCUCCUUACGAGG | 2182 |
| | AGACUGCUCAUCCUAGACGGCUUC | |
| R5271_CasPhi12 | CUUUCAAGACUAAUAGAUUGCUCCUUACGAGG | 2183 |
| | AGACCAGCUCCUCGAAGCCGUCUA | |
| R5272_CasPhi12 | CUUUCAAGACUAAUAGAUUGCUCCUUACGAGG | 2184 |
| | AGACCGCUUCCAGCUCCUCGAAGC | |
| R5273_CasPhi12 | CUUUCAAGACUAAUAGAUUGCUCCUUACGAGG | 2185 |
| | AGACGAGGAGCUGGAAGCGCAAGA | |
| R5274_CasPhi12 | CUUUCAAGACUAAUAGAUUGCUCCUUACGAGG | 2186 |
| | AGACCUGCACAGCACGUGCGGACC | |
| R5275_CasPhi12 | CUUUCAAGACUAAUAGAUUGCUCCUUACGAGG | 2187 |
| | AGACUGGAAAAGGCCGGCCAGCAG | |
| R5276_CasPhi12 | CUUUCAAGACUAAUAGAUUGCUCCUUACGAGG | 2188 |
| | AGACUUCUGGAAAAGGCCGGCCAG | |
| R5277_CasPhi12 | CUUUCAAGACUAAUAGAUUGCUCCUUACGAGG | 2189 |
| | AGACUCCAGAAGAAGCUGCUCCGA | |
| R5278_CasPhi12 | CUUUCAAGACUAAUAGAUUGCUCCUUACGAGG | 2190 |
| | AGACCCAGAAGAAGCUGCUCCGAG | |
| R5279_CasPhi12 | CUUUCAAGACUAAUAGAUUGCUCCUUACGAGG | 2191 |
| | AGACCAGAAGAAGCUGCUCCGAGG | |
| R5280_CasPhi12 | CUUUCAAGACUAAUAGAUUGCUCCUUACGAGG | 2192 |
| | AGACCACCCUCCUCCUCACAGCCC | |
| R5281_CasPhi12 | CUUUCAAGACUAAUAGAUUGCUCCUUACGAGG | 2193 |
| | AGACCUCAGGCUCUGGACCAGGCG | |
| R5282_CasPhi12 | CUUUCAAGACUAAUAGAUUGCUCCUUACGAGG | 2194 |
| | AGACGAGCUGUCCGGCUUCUCCAU | |
| R5283_CasPhi12 | CUUUCAAGACUAAUAGAUUGCUCCUUACGAGG | 2195 |
| | AGACAGCUGUCCGGCUUCUCCAUG | |
| R5284_CasPhi12 | CUUUCAAGACUAAUAGAUUGCUCCUUACGAGG | 2196 |
| | AGACUCCAUGGAGCAGGCCCAGGC | |
| R5285_CasPhi12 | CUUUCAAGACUAAUAGAUUGCUCCUUACGAGG | 2197 |
| | AGACGAGAGCUCAGGGAUGACAGA | |
| R5286_CasPhi12 | CUUUCAAGACUAAUAGAUUGCUCCUUACGAGG | 2198 |
| | AGACAGAGCUCAGGGAUGACAGAG | |
| R5287_CasPhi12 | CUUUCAAGACUAAUAGAUUGCUCCUUACGAGG | 2199 |
| | AGACGUGCUCUGUCAUCCCUGAGC | |
| R5288_CasPhi12 | CUUUCAAGACUAAUAGAUUGCUCCUUACGAGG | 2200 |
| | AGACUUCUCAGUCACAGCCACAGC | |
| R5289_CasPhi12 | CUUUCAAGACUAAUAGAUUGCUCCUUACGAGG | 2201 |
| | AGACUCAGUCACAGCCACAGCCCU | |
| R5290_CasPhi12 | CUUUCAAGACUAAUAGAUUGCUCCUUACGAGG | 2202 |
| | AGACGUGCCGGGCAGUGUGCCAGC | |
| R5291_CasPhi12 | CUUUCAAGACUAAUAGAUUGCUCCUUACGAGG | 2203 |
| | AGACUGCCGGGCAGUGUGCCAGCU | |
| R5292_CasPhi12 | CUUUCAAGACUAAUAGAUUGCUCCUUACGAGG | 2204 |
| | AGACGCGUCCUCCCCAAGCUCCAG | |
| R5293_CasPhi12 | CUUUCAAGACUAAUAGAUUGCUCCUUACGAGG | 2205 |
| | AGACGGGAGGACGCCAAGCUGCCC | |
| R5294_CasPhi12 | CUUUCAAGACUAAUAGAUUGCUCCUUACGAGG | 2206 |
| | AGACGCCAGCUCUGCCAGGGCCCC | |
| R5295_CasPhi12 | CUUUCAAGACUAAUAGAUUGCUCCUUACGAGG | 2207 |
| | AGACAUGUCUGCGGCCCAGCUCCC | |
| R5392_CasPhi12 | CUUUCAAGACUAAUAGAUUGCUCCUUACGAGG | 2208 |
| | AGACGAUGUCUGCGGCCCAGCUCC | |
| R5393_CasPhi12 | CUUUCAAGACUAAUAGAUUGCUCCUUACGAGG | 2209 |
| | AGACCCAUCCGCAGACGUGAGGAC | |
| R5394_CasPhi12 | CUUUCAAGACUAAUAGAUUGCUCCUUACGAGG | 2210 |
| | AGACGCCAUCGCCCAGGUCCUCAC | |
| R5395_CasPhi12 | CUUUCAAGACUAAUAGAUUGCUCCUUACGAGG | 2211 |
| | AGACGGCCAUCGCCCAGGUCCUCA | |
| R5396_CasPhi12 | CUUUCAAGACUAAUAGAUUGCUCCUUACGAGG | 2212 |
| | AGACGACUAAGCCUUUGGCCAUCG | |
| R5397_CasPhi12 | CUUUCAAGACUAAUAGAUUGCUCCUUACGAGG | 2213 |
| | AGACGUCCAACACCCACCGCGGGC | |
| R5398_CasPhi12 | CUUUCAAGACUAAUAGAUUGCUCCUUACGAGG | 2214 |
| | AGACCAGGAGGAAGCUGGGGAAGG | |
| R5399_CasPhi12 | CUUUCAAGACUAAUAGAUUGCUCCUUACGAGG | 2215 |
| | AGACCCCAGCUUCCUCCUGCAAUG | |
| R5400_CasPhi12 | CUUUCAAGACUAAUAGAUUGCUCCUUACGAGG | 2216 |
| | AGACCUCCUGCAAUGCUUCCUGGG | |
| R5401_CasPhi12 | CUUUCAAGACUAAUAGAUUGCUCCUUACGAGG | 2217 |
| | AGACCUGGGGGCCCUGUGGCUGGC | |
| R5402_CasPhi12 | CUUUCAAGACUAAUAGAUUGCUCCUUACGAGG | 2218 |
| | AGACGCCACUCAGAGCCAGCCACA | |
| R5403_CasPhi12 | CUUUCAAGACUAAUAGAUUGCUCCUUACGAGG | 2219 |
| | AGACCGCCACUCAGAGCCAGCCAC | |
| R5404_CasPhi12 | CUUUCAAGACUAAUAGAUUGCUCCUUACGAGG | 2220 |
| | AGACAUUUCGCCACUCAGAGCCAG | |
| R5405_CasPhi12 | CUUUCAAGACUAAUAGAUUGCUCCUUACGAGG | 2221 |
| | AGACUCCUUGAUUUCGCCACUCAG | |
| R5406_CasPhi12 | CUUUCAAGACUAAUAGAUUGCUCCUUACGAGG | 2222 |
| | AGACGGGUCAAUGCUAGGUACUGC | |
| R5407_CasPhi12 | CUUUCAAGACUAAUAGAUUGCUCCUUACGAGG | 2223 |
| | AGACCUUGGGGUCAAUGCUAGGUA | |
| R5408_CasPhi12 | CUUUCAAGACUAAUAGAUUGCUCCUUACGAGG | 2224 |
| | AGACUUCCUUGGGGUCAAUGCUAG | |
| R5409_CasPhi12 | CUUUCAAGACUAAUAGAUUGCUCCUUACGAGG | 2225 |
| | AGACACCCCAAGGAAGAAGAGGCC | |
| R5410_CasPhi12 | CUUUCAAGACUAAUAGAUUGCUCCUUACGAGG | 2226 |
| | AGACUCAUAGGGCCUCUUCUUCCU | |
| R5411_CasPhi12 | CUUUCAAGACUAAUAGAUUGCUCCUUACGAGG | 2227 |
| | AGACCUGGCUGGGCUGAUCUUCCA | |
| R5412_CasPhi12 | CUUUCAAGACUAAUAGAUUGCUCCUUACGAGG | 2228 |
| | AGACUGGCUGGGCUGAUCUUCCAG | |
| R5413_CasPhi12 | CUUUCAAGACUAAUAGAUUGCUCCUUACGAGG | 2229 |
| | AGACCAGCCUCCCGCCCGCUGCCU | |
| R5414_CasPh12 | CUUUCAAGACUAAUAGAUUGCUCCUUACGAGG | 2230 |
| | AGACCUGUCCACCGAGGCAGCCGC | |
| R5415_CasPh12 | CUUUCAAGACUAAUAGAUUGCUCCUUACGAGG | 2231 |
| | AGACUGCUUCCUGUCCACCGAGGC | |
| R5416_CasPh12 | CUUUCAAGACUAAUAGAUUGCUCCUUACGAGG | 2232 |
| | AGACAGGUACCUCGCAAGCACCUU | |
| R5417_CasPh12 | CUUUCAAGACUAAUAGAUUGCUCCUUACGAGG | 2233 |
| | AGACCGAGGUACCUGAAGCGGCUG | |
| R5418_CasPh12 | CUUUCAAGACUAAUAGAUUGCUCCUUACGAGG | 2234 |
| | AGACCAGCCUCCUCGGCCUCGUGG | |
| R5419_CasPh12 | CUUUCAAGACUAAUAGAUUGCUCCUUACGAGG | 2235 |
| | AGACGGCAGCACGUGGUACAGGAG | |
| R5420_CasPh12 | CUUUCAAGACUAAUAGAUUGCUCCUUACGAGG | 2236 |
| | AGACGCAGCACGUGGUACAGGAGC | |
| R5421_CasPh12 | CUUUCAAGACUAAUAGAUUGCUCCUUACGAGG | 2237 |
| | AGACUCUGGGCACCCGCCUCACGC | |
| R5422_CasPh12 | CUUUCAAGACUAAUAGAUUGCUCCUUACGAGG | 2238 |
| | AGACCUGGGCACCCGCCUCACGCC | |
| R5423_CasPh12 | CUUUCAAGACUAAUAGAUUGCUCCUUACGAGG | 2239 |
| | AGACUGGGCACCCGCCUCACGCCU | |
| R5424_CasPh12 | CUUUCAAGACUAAUAGAUUGCUCCUUACGAGG | 2240 |
| | AGACCCCAGUACAUGUGCAUCAGG | |
| R5425_CasPh12 | CUUUCAAGACUAAUAGAUUGCUCCUUACGAGG | 2241 |
| | AGACGCCCGCCGCCUCCAAGGCCU | |
| R5426_CasPh12 | CUUUCAAGACUAAUAGAUUGCUCCUUACGAGG | 2242 |
| | AGACGAGGCGGCGGGCCAAGACUU | |
| R5427_CasPh12 | CUUUCAAGACUAAUAGAUUGCUCCUUACGAGG | 2243 |
| | AGACUCCCUGGACCUCCGCAGCAC | |
| R5428_CasPh12 | CUUUCAAGACUAAUAGAUUGCUCCUUACGAGG | 2244 |
| | AGACGCCCCUCUGGAUUGGGGAGC | |
| R5429_CasPh12 | CUUUCAAGACUAAUAGAUUGCUCCUUACGAGG | 2245 |
| | AGACCCCCUCUGGAUUGGGGAGCC | |
| R5430_CasPh12 | CUUUCAAGACUAAUAGAUUGCUCCUUACGAGG | 2246 |
| | AGACGGGAGCCUCGUGGGACUCAG | |
| R5431_CasPh12 | CUUUCAAGACUAAUAGAUUGCUCCUUACGAGG | 2247 |
| | AGACGUCUCCCCAUGCUGCUGCAG | |
| R5432_CasPh12 | CUUUCAAGACUAAUAGAUUGCUCCUUACGAGG | 2248 |
| | AGACUCCUCUGCUGCCUGAAGUAG | |
| R5433_CasPh12 | CUUUCAAGACUAAUAGAUUGCUCCUUACGAGG | 2249 |
| | AGACAGGCAGCAGAGGAGAAGUUC | |
| R5434_CasPh12 | CUUUCAAGACUAAUAGAUUGCUCCUUACGAGG | 2250 |
| | AGACAAAGGCUCGAUGGUGAACUU | |
| R5435_CasPh12 | CUUUCAAGACUAAUAGAUUGCUCCUUACGAGG | 2251 |
| | AGACGAAAGGCUCGAUGGUGAACU | |
| R5436_CasPh12 | CUUUCAAGACUAAUAGAUUGCUCCUUACGAGG | 2252 |
| | AGACACCAUCGAGCCUUUCAAAGC | |
| R5437_CasPh12 | CUUUCAAGACUAAUAGAUUGCUCCUUACGAGG | 2253 |
| | AGACGCUUUGAAAGGCUCGAUGGU | |
| R5438_CasPh12 | CUUUCAAGACUAAUAGAUUGCUCCUUACGAGG | 2254 |
| | AGACAGGGACUUGGCUUUGAAAGG | |
| R5439_CasPh12 | CUUUCAAGACUAAUAGAUUGCUCCUUACGAGG | 2255 |
| | AGACCAAAGCCAAGUCCCUGAAGG | |
| R5440_CasPh12 | CUUUCAAGACUAAUAGAUUGCUCCUUACGAGG | 2256 |
| | AGACAAAGCCAAGUCCCUGAAGGA | |
| R5441_CasPh12 | CUUUCAAGACUAAUAGAUUGCUCCUUACGAGG | 2257 |
| | AGACCACAUCCUUCAGGGACUUGG | |
| R5442_CasPh12 | CUUUCAAGACUAAUAGAUUGCUCCUUACGAGG | 2258 |
| | AGACCCAGGUCUUCCACAUCCUUC | |
| R5443_CasPh12 | CUUUCAAGACUAAUAGAUUGCUCCUUACGAGG | 2259 |
| | AGACCCCAGGUCUUCCACAUCCUU | |
| R5444_CasPh12 | CUUUCAAGACUAAUAGAUUGCUCCUUACGAGG | 2260 |
| | AGACCUCGGAAGACACAGCUGGGG | |
| R5445_CasPh12 | CUUUCAAGACUAAUAGAUUGCUCCUUACGAGG | 2261 |
| | AGACGGUCCCGAACAGCAGGGAGC | |
| R5446_CasPh12 | CUUUCAAGACUAAUAGAUUGCUCCUUACGAGG | 2262 |
| | AGACAGGUCCCGAACAGCAGGGAG | |
| R5447_CasPh12 | CUUUCAAGACUAAUAGAUUGCUCCUUACGAGG | 2263 |
| | AGACUUUAGGUCCCGAACAGCAGG | |
| R5448_CasPh12 | CUUUCAAGACUAAUAGAUUGCUCCUUACGAGG | 2264 |
| | AGACCUUUAGGUCCCGAACAGCAG | |
| R5449_CasPh12 | CUUUCAAGACUAAUAGAUUGCUCCUUACGAGG | 2265 |
| | AGACGGGACCUAAAGAAACUGGAG | |
| R5450_CasPh12 | CUUUCAAGACUAAUAGAUUGCUCCUUACGAGG | 2266 |
| | AGACGGGAAAGCCUGGGGGCCUGA | |
| R5451_CasPh12 | CUUUCAAGACUAAUAGAUUGCUCCUUACGAGG | 2267 |
| | AGACGGGGAAAGCCUGGGGGCCUG | |
| R5452_CasPh12 | CUUUCAAGACUAAUAGAUUGCUCCUUACGAGG | 2268 |
| | AGACCCCCAAACUGGUGCGGAUCC | |
| R5453_CasPh12 | CUUUCAAGACUAAUAGAUUGCUCCUUACGAGG | 2269 |
| | AGACCCCAAACUGGUGCGGAUCCU | |
| R5454_CasPh12 | CUUUCAAGACUAAUAGAUUGCUCCUUACGAGG | 2270 |
| | AGACUUCUCACUCAGCGCAUCCAG | |
| R5455_CasPh12 | CUUUCAAGACUAAUAGAUUGCUCCUUACGAGG | 2271 |
| | AGACAGCUGGGGGAAGGUGGCUGA | |
| R5456_CasPh12 | CUUUCAAGACUAAUAGAUUGCUCCUUACGAGG | 2272 |
| | AGACCCCCAGCUGAAGUCCUUGGA | |
| R5457_CasPh12 | CUUUCAAGACUAAUAGAUUGCUCCUUACGAGG | 2273 |
| | AGACCAAGGACUUCAGCUGGGGGA | |
| R5458_CasPh12 | CUUUCAAGACUAAUAGAUUGCUCCUUACGAGG | 2274 |
| | AGACCCAAGGACUUCAGCUGGGGG | |
| R5459_CasPh12 | CUUUCAAGACUAAUAGAUUGCUCCUUACGAGG | 2275 |
| | AGACAGGGUUUCCAAGGACUUCAG | |
| R5460_CasPh12 | CUUUCAAGACUAAUAGAUUGCUCCUUACGAGG | 2276 |
| | AGACUAGGCACCCAGGUCAGUGAU | |
| R5461_CasPh12 | CUUUCAAGACUAAUAGAUUGCUCCUUACGAGG | 2277 |
| | AGACGUAGGCACCCAGGUCAGUGA | |
| R5462_CasPh12 | CUUUCAAGACUAAUAGAUUGCUCCUUACGAGG | 2278 |
| | AGACGCUCGCUGCAUCCCUGCUCA | |
| R5463_CasPh12 | CUUUCAAGACUAAUAGAUUGCUCCUUACGAGG | 2279 |
| | AGACGCCUGAGCAGGGAUGCAGCG | |
| R5464_CasPh12 | CUUUCAAGACUAAUAGAUUGCUCCUUACGAGG | 2280 |
| | AGACUACAAUAACUGCAUCUGCGA | |
| R5465_CasPh12 | CUUUCAAGACUAAUAGAUUGCUCCUUACGAGG | 2281 |
| | AGACGCUCGUGUGCUUCCGGACAU | |
| R5466_CasPh12 | CUUUCAAGACUAAUAGAUUGCUCCUUACGAGG | 2282 |
| | AGACCGGACAUGGUGUCCCUCCGG | |
| R5467_CasPh12 | CUUUCAAGACUAAUAGAUUGCUCCUUACGAGG | 2283 |
| | AGACACGGCUGCCGGGGCCCAGCA | |
| R5468_CasPh12 | CUUUCAAGACUAAUAGAUUGCUCCUUACGAGG | 2284 |
| | AGACGGAGGUGUCCUCAUGUGGAG | |
| R5469_CasPh12 | CUUUCAAGACUAAUAGAUUGCUCCUUACGAGG | 2285 |
| | AGACCUGGACACUGAAUGGGAUGG | |
| R5470_CasPh12 | CUUUCAAGACUAAUAGAUUGCUCCUUACGAGG | 2286 |
| | AGACAGUGUCCAGGAACACCUGCA | |
| R5471_CasPh12 | CUUUCAAGACUAAUAGAUUGCUCCUUACGAGG | 2287 |
| | AGACCAGGUGUUCCUGGACACUGA | |
| R5472_CasPh12 | CUUUCAAGACUAAUAGAUUGCUCCUUACGAGG | 2288 |
| | AGACUUGCAGGUGUUCCUGGACAC | |
| R5473_CasPh12 | CUUUCAAGACUAAUAGAUUGCUCCUUACGAGG | 2289 |
| | AGACACGGAUCAGCCUGAGAUGAU | |

TABLE P
CasΦ.32 gRNAs targeting human CIITA

| | Repeat + | |
|---|---|---|
| Name | spacer sequence RNA Sequence (5′→3′) | SEQ ID NO |
| R4503_CasPhi32_ | GCUGGGGACCGAUCCUGAUUGCUCGCUGCGGCG | 992 |
| C2TA_T1.1 | AGACCUACACAAUGCGUUGCCUGG | |
| R4504_CasPhi32_ | GCUGGGGACCGAUCCUGAUUGCUCGCUGCGGCG | 993 |
| C2TA_T1.2 | AGACGGGCUCUGACAGGUAGGACC | |
| R4505_CasPhi32_ | GCUGGGGACCGAUCCUGAUUGCUCGCUGCGGCG | 994 |
| C2TA_T1.3 | AGACUGUAGGAAUCCCAGCCAGGC | |
| R4506_CasPhi32_ | GCUGGGGACCGAUCCUGAUUGCUCGCUGCGGCG | 995 |
| C2TA_T1.8 | AGACCCUGGCUCCACGCCCUGCUG | |
| R4507_CasPhi32_ | GCUGGGGACCGAUCCUGAUUGCUCGCUGCGGCG | 996 |
| C2TA_T1.9 | AGACGGGAAGCUGAGGGCACGAGG | |
| R4508_CasPhi32_ | GCUGGGGACCGAUCCUGAUUGCUCGCUGCGGCG | 997 |
| C2TA_T2.1 | AGACACAGCGAUGCUGACCCCCUG | |
| R4509_CasPhi32_ | GCUGGGGACCGAUCCUGAUUGCUCGCUGCGGCG | 998 |
| C2TA_T2.2 | AGACUUAACAGCGAUGCUGACCCC | |
| R4510_CasPhi32_ | GCUGGGGACCGAUCCUGAUUGCUCGCUGCGGCG | 999 |
| C2TA_T2.3 | AGACUAUGACCAGAUGGACCUGGC | |
| R4511_CasPhi32_ | GCUGGGGACCGAUCCUGAUUGCUCGCUGCGGCG | 1000 |
| C2TA_T2.4 | AGACGGGCCCCUAGAAGGUGGCUA | |
| R4512_CasPhi32_ | GCUGGGGACCGAUCCUGAUUGCUCGCUGCGGCG | 1001 |
| C2TA_T2.5 | AGACUAGGGGCCCCAACUCCAUGG | |
| R4513_CasPhi32_ | GCUGGGGACCGAUCCUGAUUGCUCGCUGCGGCG | 1002 |
| C2TA_T2.6 | AGACAGAAGCUCCAGGUAGCCACC | |
| R4514_CasPhi32_ | GCUGGGGACCGAUCCUGAUUGCUCGCUGCGGCG | 1003 |
| C2TA_T2.7 | AGACUCCAGCCAGGUCCAUCUGGU | |
| R4515_CasPhi32 | GCUGGGGACCGAUCCUGAUUGCUCGCUGCGGCG | 1004 |
| C2TA_T2.8 | AGACUUCUCCAGCCAGGUCCAUCU | |

TABLE Q
CasΦ.12 gRNAs targeting mouse PCSK9

| | Repeat + | |
|---|---|---|
| Name | spacer sequence RNA Sequence (5′→3′) | SEQ ID NO |
| R4238_ | CUUUCAAGACUAAUAGAUUGCUCCUUACGAGGAG | 1005 |
| CasPhi12 | ACCCGCUGUUGCCGCCGCUGCU | |
| R4239_ | CUUUCAAGACUAAUAGAUUGCUCCUUACGAGGAG | 1006 |
| CasPhi12 | ACCCGCCGCUGCUGCUGCUGUU | |
| R4240_ | CUUUCAAGACUAAUAGAUUGCUCCUUACGAGGAG | 1007 |
| CasPhi12 | ACCUGCUACUGUGCCCCACCGG | |
| R4241_ | CUUUCAAGACUAAUAGAUUGCUCCUUACGAGGAG | 1008 |
| CasPhi12 | ACAUAAUCUCCAUCCUCGUCCU | |
| R4242_ | CUUUCAAGACUAAUAGAUUGCUCCUUACGAGGAG | 1009 |
| CasPhi12 | ACUGAAGAGCUGAUGCUCGCCC | |
| R4243_ | CUUUCAAGACUAAUAGAUUGCUCCUUACGAGGAG | 1010 |
| CasPhi12 | ACGAGCAACGGCGGAAGGUGGC | |
| R4244_ | CUUUCAAGACUAAUAGAUUGCUCCUUACGAGGAG | 1011 |
| CasPhi12 | ACCUGGCAGCCUCCAGGCCUCC | |
| R4245_ | CUUUCAAGACUAAUAGAUUGCUCCUUACGAGGAG | 1012 |
| CasPhi12 | ACUGGUGCUGAUGGAGGAGACC | |
| R4246_ | CUUUCAAGACUAAUAGAUUGCUCCUUACGAGGAG | 1013 |
| CasPhi12 | ACAAUCUGUAGCCUCUGGGUCU | |
| R4247_ | CUUUCAAGACUAAUAGAUUGCUCCUUACGAGGAG | 1014 |
| CasPhi12 | ACUUCAAUCUGUAGCCUCUGGG | |
| R4248_ | CUUUCAAGACUAAUAGAUUGCUCCUUACGAGGAG | 1015 |
| CasPhi12 | ACGUUCAAUCUGUAGCCUCUGG | |
| R4249_ | CUUUCAAGACUAAUAGAUUGCUCCUUACGAGGAG | 1016 |
| CasPhi12 | ACAACAAACUGCCCACCGCCUG | |
| R4250_ | CUUUCAAGACUAAUAGAUUGCUCCUUACGAGGAG | 1017 |
| CasPhi12 | ACAUGACAUAGCCCCGGCGGGC | |
| R4251_ | CUUUCAAGACUAAUAGAUUGCUCCUUACGAGGAG | 1018 |
| CasPhi12 | ACUACAUAUCUUUUAUGACCUC | |
| R4252_ | CUUUCAAGACUAAUAGAUUGCUCCUUACGAGGAG | 1019 |
| CasPhi12 | ACUAUGACCUCUUCCCUGGCUU | |
| R4253_ | CUUUCAAGACUAAUAGAUUGCUCCUUACGAGGAG | 1020 |
| CasPhi12 | ACAUGACCUCUUCCCUGGCUUC | |
| R4254_ | CUUUCAAGACUAAUAGAUUGCUCCUUACGAGGAG | 1021 |
| CasPhi12 | ACUGACCUCUUCCCUGGCUUCU | |
| R4255_ | CUUUCAAGACUAAUAGAUUGCUCCUUACGAGGAG | 1022 |
| CasPhi12 | ACACCAAGAAGCCAGGGAAGAG | |
| R4256_ | CUUUCAAGACUAAUAGAUUGCUCCUUACGAGGAG | 1023 |
| CasPhi12 | ACCCUGGCUUCUUGGUGAAGAU | |
| R4257_ | CUUUCAAGACUAAUAGAUUGCUCCUUACGAGGAG | 1024 |
| CasPhi12 | ACUUGGUGAAGAUGAGCAGUGA | |
| R4258_ | CUUUCAAGACUAAUAGAUUGCUCCUUACGAGGAG | 1025 |
| CasPhi12 | ACGUGAAGAUGAGCAGUGACCU | |
| R4259_ | CUUUCAAGACUAAUAGAUUGCUCCUUACGAGGAG | 1026 |
| CasPhi12 | ACCCCCAUGUGGAGUACAUUGA | |
| R4260_ | CUUUCAAGACUAAUAGAUUGCUCCUUACGAGGAG | 1027 |
| CasPhi12 | ACCUCAAUGUACUCCACAUGGG | |
| R4261_ | CUUUCAAGACUAAUAGAUUGCUCCUUACGAGGAG | 1028 |
| CasPhi12 | ACAGGAAGACUCCUUUGUCUUC | |
| R4262_ | CUUUCAAGACUAAUAGAUUGCUCCUUACGAGGAG | 1029 |
| CasPhi12 | ACGUCUUCGCCCAGAGCAUCCC | |
| R4263_ | CUUUCAAGACUAAUAGAUUGCUCCUUACGAGGAG | 1030 |
| CasPhi12 | ACUCUUCGCCCAGAGCAUCCCA | |
| R4264_ | CUUUCAAGACUAAUAGAUUGCUCCUUACGAGGAG | 1031 |
| CasPhi12 | ACGCCCAGAGCAUCCCAUGGAA | |
| R4265_ | CUUUCAAGACUAAUAGAUUGCUCCUUACGAGGAG | 1032 |
| CasPhi12 | ACCAUGGGAUGCUCUGGGCGAA | |
| R4266_ | CUUUCAAGACUAAUAGAUUGCUCCUUACGAGGAG | 1033 |
| CasPhi12 | ACGCUCCAGGUUCCAUGGGAUG | |
| R4267_ | CUUUCAAGACUAAUAGAUUGCUCCUUACGAGGAG | 1034 |
| CasPhi12 | ACUCCCAGCAUGGCACCAGACA | |
| R4268_ | CUUUCAAGACUAAUAGAUUGCUCCUUACGAGGAG | 1035 |
| CasPhi12 | ACCUCUGUCUGGUGCCAUGCUG | |
| R4269_ | CUUUCAAGACUAAUAGAUUGCUCCUUACGAGGAG | 1036 |
| CasPhi12 | ACGAUACCAGCAUCCAGGGUGC | |
| R4270_ | CUUUCAAGACUAAUAGAUUGCUCCUUACGAGGAG | 1037 |
| CasPhi12 | ACAGGGCAGGGUCACCAUCACC | |
| R4271_ | CUUUCAAGACUAAUAGAUUGCUCCUUACGAGGAG | 1038 |
| CasPhi12 | ACAAGUCGGUGAUGGUGACCCU | |
| R4272_ | CUUUCAAGACUAAUAGAUUGCUCCUUACGAGGAG | 1039 |
| CasPhi12 | ACAACAGCGUGCCGGAGGAGGA | |
| R4273_ | CUUUCAAGACUAAUAGAUUGCUCCUUACGAGGAG | 1040 |
| CasPhi12 | ACGCCACACCAGCAUCCCGGCC | |
| R4274_ | CUUUCAAGACUAAUAGAUUGCUCCUUACGAGGAG | 1041 |
| CasPhi12 | ACAGCACACGCAGGCUGUGCAG | |
| R4275_ | CUUUCAAGACUAAUAGAUUGCUCCUUACGAGGAG | 1042 |
| CasPhi12 | ACACAGUUGAGCACACGCAGGC | |
| R4276_ | CUUUCAAGACUAAUAGAUUGCUCCUUACGAGGAG | 1043 |
| CasPhi12 | ACCCUUGACAGUUGAGCACACG | |
| R4277_ | CUUUCAAGACUAAUAGAUUGCUCCUUACGAGGAG | 1044 |
| CasPhi12 | ACGCUGACUCUUCCGAAUAAAC | |
| R4278_ | CUUUCAAGACUAAUAGAUUGCUCCUUACGAGGAG | 1045 |
| CasPhi12 | ACAUUCGGAAGAGUCAGCUAAU | |
| R4279_ | CUUUCAAGACUAAUAGAUUGCUCCUUACGAGGAG | 1046 |
| CasPhi12 | ACUUCGGAAGAGUCAGCUAAUC | |
| R4280_ | CUUUCAAGACUAAUAGAUUGCUCCUUACGAGGAG | 1047 |
| CasPhi12 | ACGGAAGAGUCAGCUAAUCCAG | |
| R4281_ | CUUUCAAGACUAAUAGAUUGCUCCUUACGAGGAG | 1048 |
| CasPhi12 | ACUGCUGCCCCUGGCCGGUGGG | |
| R4282_ | CUUUCAAGACUAAUAGAUUGCUCCUUACGAGGAG | 1049 |
| CasPhi12 | ACAGGAUGCGGCUAUACCCACC | |
| R4283_ | CUUUCAAGACUAAUAGAUUGCUCCUUACGAGGAG | 1050 |
| CasPhi12 | ACCCAGCUGCUGCAACCAGCAC | |
| R4284_ | CUUUCAAGACUAAUAGAUUGCUCCUUACGAGGAG | 1051 |
| CasPhi12 | ACCAGCAGCUGGGAACUUCCGG | |
| R4285_ | CUUUCAAGACUAAUAGAUUGCUCCUUACGAGGAG | 1052 |
| CasPhi12 | ACCGGGACGACGCCUGCCUCUA | |
| R4286_ | CUUUCAAGACUAAUAGAUUGCUCCUUACGAGGAG | 1053 |
| CasPhi12 | ACGUGGCCCCGACUGUGAUGAC | |
| R4287_ | CUUUCAAGACUAAUAGAUUGCUCCUUACGAGGAG | 1054 |
| CasPhi12 | ACCCUUGGGGACUUUGGGGACU | |
| R4288_ | CUUUCAAGACUAAUAGAUUGCUCCUUACGAGGAG | 1055 |
| CasPhi12 | ACGUCCCCAAAGUCCCCAAGGU | |
| R4289_ | CUUUCAAGACUAAUAGAUUGCUCCUUACGAGGAG | 1056 |
| CasPhi12 | ACGGGACUUUGGGGACUAAUUU | |
| R4290_ | CUUUCAAGACUAAUAGAUUGCUCCUUACGAGGAG | 1057 |
| CasPhi12 | ACGGGGACUAAUUUUGGACGCU | |
| R4291_ | CUUUCAAGACUAAUAGAUUGCUCCUUACGAGGAG | 1058 |
| CasPhi12 | ACGGGACUAAUUUUGGACGCUG | |
| R4292_ | CUUUCAAGACUAAUAGAUUGCUCCUUACGAGGAG | 1059 |
| CasPhi12 | ACUGGACGCUGUGUGGAUCUCU | |
| R4293_ | CUUUCAAGACUAAUAGAUUGCUCCUUACGAGGAG | 1060 |
| CasPhi12 | ACGGACGCUGUGUGGAUCUCUU | |
| R4294_ | CUUUCAAGACUAAUAGAUUGCUCCUUACGAGGAG | 1061 |
| CasPhi12 | ACGACGCUGUGUGGAUCUCUUU | |
| R4295_ | CUUUCAAGACUAAUAGAUUGCUCCUUACGAGGAG | 1062 |
| CasPhi12 | ACCCGGGGGCAAAGAGAUCCAC | |
| R4296_ | CUUUCAAGACUAAUAGAUUGCUCCUUACGAGGAG | 1063 |
| CasPhi12 | ACGCCCCCGGGAAGGACAUCAU | |
| R4297_ | CUUUCAAGACUAAUAGAUUGCUCCUUACGAGGAG | 1064 |
| CasPhi12 | ACCCCCCGGGAAGGACAUCAUC | |
| R4298_ | CUUUCAAGACUAAUAGAUUGCUCCUUACGAGGAG | 1065 |
| CasPhi12 | ACAUGUCACAGAGUGGGACCUC | |
| R4299_ | CUUUCAAGACUAAUAGAUUGCUCCUUACGAGGAG | 1066 |
| CasPhi12 | ACUGGCUCGGAUGCUGAGCCGG | |
| R4300_ | CUUUCAAGACUAAUAGAUUGCUCCUUACGAGGAG | 1067 |
| CasPhi12 | ACCCCUGGCCGAGCUGCGGCAG | |
| R4301_ | CUUUCAAGACUAAUAGAUUGCUCCUUACGAGGAG | 1068 |
| CasPhi12 | ACGUAGAGAAGUGGAUCAGCCU | |
| R4302_ | CUUUCAAGACUAAUAGAUUGCUCCUUACGAGGAG | 1069 |
| CasPhi12 | ACGGUAGAGAAGUGGAUCAGCC | |
| R4303_ | CUUUCAAGACUAAUAGAUUGCUCCUUACGAGGAG | 1070 |
| CasPhi12 | ACUCUACCAAAGACGUCAUCAA | |
| R4304_ | CUUUCAAGACUAAUAGAUUGCUCCUUACGAGGAG | 1071 |
| CasPhi12 | ACAUGACGUCUUUGGUAGAGAA | |
| R4305_ | CUUUCAAGACUAAUAGAUUGCUCCUUACGAGGAG | 1072 |
| CasPhi12 | ACCCUGAGGACCAGCAGGUGCU | |
| R4306_ | CUUUCAAGACUAAUAGAUUGCUCCUUACGAGGAG | 1073 |
| CasPhi12 | ACGGGGUCAGCACCUGCUGGUC | |
| R4307_ | CUUUCAAGACUAAUAGAUUGCUCCUUACGAGGAG | 1074 |
| CasPhi12 | ACGAGUGGGCCCCGAGUGUGCC | |
| R4308_ | CUUUCAAGACUAAUAGAUUGCUCCUUACGAGGAG | 1075 |
| CasPhi12 | ACUGGGGCACAGCGGGCUGUAG | |
| R4309_ | CUUUCAAGACUAAUAGAUUGCUCCUUACGAGGAG | 1076 |
| CasPhi12 | ACUCCAGGAGCGGGAGGCGUCG | |
| R4310_ | CUUUCAAGACUAAUAGAUUGCUCCUUACGAGGAG | 1077 |
| CasPhi12 | ACCAGACCUGCUGGCCUCCUAU | |
| R4311_ | CUUUCAAGACUAAUAGAUUGCUCCUUACGAGGAG | 1078 |
| CasPhi12 | ACAGGGCCUUGCAGACCUGCUG | |
| R4312_ | CUUUCAAGACUAAUAGAUUGCUCCUUACGAGGAG | 1079 |
| CasPhi12 | ACGGGGGUGAGGGUGUCUAUGC | |
| R4313_ | CUUUCAAGACUAAUAGAUUGCUCCUUACGAGGAG | 1080 |
| CasPhi12 | ACGGGGUGAGGGUGUCUAUGCC | |
| R4314_ | CUUUCAAGACUAAUAGAUUGCUCCUUACGAGGAG | 1081 |
| CasPhi12 | ACGCACGGGGAACCAGGCAGCA | |
| R4315_ | CUUUCAAGACUAAUAGAUUGCUCCUUACGAGGAG | 1082 |
| CasPhi12 | ACCCCGUGCCAACUGCAGCAUC | |
| R4316_ | CUUUCAAGACUAAUAGAUUGCUCCUUACGAGGAG | 1083 |
| CasPhi12 | ACUGGAUGCUGCAGUUGGCACG | |
| R4317_ | CUUUCAAGACUAAUAGAUUGCUCCUUACGAGGAG | 1084 |
| CasPhi12 | ACUGGUGGCAGUGGACAUGGGU | |
| R4318_ | CUUUCAAGACUAAUAGAUUGCUCCUUACGAGGAG | 1085 |
| CasPhi12 | ACCACUUCCCAAUGGAAGCUGC | |
| R4319_ | CUUUCAAGACUAAUAGAUUGCUCCUUACGAGGAG | 1086 |
| CasPhi12 | ACCAUUGGGAAGUGGAAGACCU | |
| R4320_ | CUUUCAAGACUAAUAGAUUGCUCCUUACGAGGAG | 1087 |
| CasPhi12 | ACGGAAGUGGAAGACCUUAGUG | |
| R4321_ | CUUUCAAGACUAAUAGAUUGCUCCUUACGAGGAG | 1088 |
| CasPhi12 | ACGUGUCCGGAGGCAGCCUGCG | |
| R4322_ | CUUUCAAGACUAAUAGAUUGCUCCUUACGAGGAG | 1089 |
| CasPhi12 | ACGCCACCAGGCGGCCAGUGUC | |
| R4323_ | CUUUCAAGACUAAUAGAUUGCUCCUUACGAGGAG | 1090 |
| CasPhi12 | ACCUGCUGCCAUGCCCCAGGGC | |
| R4324_ | CUUUCAAGACUAAUAGAUUGCUCCUUACGAGGAG | 1091 |
| CasPhi12 | ACCAGCCCUGGGGCAUGGCAGC | |
| R4325_ | CUUUCAAGACUAAUAGAUUGCUCCUUACGAGGAG | 1092 |
| CasPhi12 | ACCAUUCCAGCCCUGGGGCAUG | |
| R4326_ | CUUUCAAGACUAAUAGAUUGCUCCUUACGAGGAG | 1093 |
| CasPhi12 | ACGCAUUCCAGCCCUGGGGCAU | |
| R4327_ | CUUUCAAGACUAAUAGAUUGCUCCUUACGAGGAG | 1094 |
| CasPhi12 | ACUGCAUUCCAGCCCUGGGGCA | |
| R4328_ | CUUUCAAGACUAAUAGAUUGCUCCUUACGAGGAG | 1095 |
| CasPhi12 | ACAUUUUGCAUUCCAGCCCUGG | |
| R4329_ | CUUUCAAGACUAAUAGAUUGCUCCUUACGAGGAG | 1096 |
| CasPhi12 | ACCAUCCAGUCAGGGUCCAUCC | |
| R4330_ | CUUUCAAGACUAAUAGAUUGCUCCUUACGAGGAG | 1097 |
| CasPhi12 | ACUCCACGCUGUAGGCUCCCAG | |
| R4331_ | CUUUCAAGACUAAUAGAUUGCUCCUUACGAGGAG | 1098 |
| CasPhi12 | ACCCACACACAGGUUGUCCACG | |
| R4332_ | CUUUCAAGACUAAUAGAUUGCUCCUUACGAGGAG | 1099 |
| CasPhi12 | ACUCCACUGGUCCUGUCUGCUC | |
| R4333_ | CUUUCAAGACUAAUAGAUUGCUCCUUACGAGGAG | 1100 |
| CasPhi12 | ACCUGAAGGCCGGCUCCGGCAG | |

TABLE R
CasΦ.32 gRNAs targeting mouse PCSK9

| | Repeat + | |
|---|---|---|
| Name | spacer sequence RNA Sequence (5′→3′) | SEQ ID NO |
| R4238_ | GCUGGGGACCGAUCCUGAUUGCUCGCUGCGGCGAG | 1101 |
| CasPhi32 | ACCCGCUGUUGCCGCCGCUGCU | |
| R4239_ | GCUGGGGACCGAUCCUGAUUGCUCGCUGCGGCGAG | 1102 |
| CasPhi32 | ACCCGCCGCUGCUGCUGCUGUU | |
| R4240_ | GCUGGGGACCGAUCCUGAUUGCUCGCUGCGGCGAG | 1103 |
| CasPhi32 | ACCUGCUACUGUGCCCCACCGG | |
| R4241_ | GCUGGGGACCGAUCCUGAUUGCUCGCUGCGGCGAG | 1104 |
| CasPhi32 | ACAUAAUCUCCAUCCUCGUCCU | |
| R4242_ | GCUGGGGACCGAUCCUGAUUGCUCGCUGCGGCGAG | 1105 |
| CasPhi32 | ACUGAAGAGCUGAUGCUCGCCC | |
| R4243_ | GCUGGGGACCGAUCCUGAUUGCUCGCUGCGGCGAG | 1106 |
| CasPhi32 | ACGAGCAACGGCGGAAGGUGGC | |
| R4244_ | GCUGGGGACCGAUCCUGAUUGCUCGCUGCGGCGAG | 1107 |
| CasPhi32 | ACCUGGCAGCCUCCAGGCCUCC | |
| R4245_ | GCUGGGGACCGAUCCUGAUUGCUCGCUGCGGCGAG | 1108 |
| CasPhi32 | ACUGGUGCUGAUGGAGGAGACC | |
| R4246_ | GCUGGGGACCGAUCCUGAUUGCUCGCUGCGGCGAG | 1109 |
| CasPhi32 | ACAAUCUGUAGCCUCUGGGUCU | |
| R4247_ | GCUGGGGACCGAUCCUGAUUGCUCGCUGCGGCGAG | 1110 |
| CasPhi32 | ACUUCAAUCUGUAGCCUCUGGG | |
| R4248_ | GCUGGGGACCGAUCCUGAUUGCUCGCUGCGGCGAG | 1111 |
| CasPhi32 | ACGUUCAAUCUGUAGCCUCUGG | |
| R4249_ | GCUGGGGACCGAUCCUGAUUGCUCGCUGCGGCGAG | 1112 |
| CasPhi32 | ACAACAAACUGCCCACCGCCUG | |
| R4250_ | GCUGGGGACCGAUCCUGAUUGCUCGCUGCGGCGAG | 1113 |
| CasPhi32 | ACAUGACAUAGCCCCGGCGGGC | |
| R4251_ | GCUGGGGACCGAUCCUGAUUGCUCGCUGCGGCGAG | 1114 |
| CasPhi32 | ACUACAUAUCUUUUAUGACCUC | |
| R4252_ | GCUGGGGACCGAUCCUGAUUGCUCGCUGCGGCGAG | 1115 |
| CasPhi32 | ACUAUGACCUCUUCCCUGGCUU | |
| R4253_ | GCUGGGGACCGAUCCUGAUUGCUCGCUGCGGCGAG | 1116 |
| CasPhi32 | ACAUGACCUCUUCCCUGGCUUC | |
| R4254_ | GCUGGGGACCGAUCCUGAUUGCUCGCUGCGGCGAG | 1117 |
| CasPhi32 | ACUGACCUCUUCCCUGGCUUCU | |
| R4255_ | GCUGGGGACCGAUCCUGAUUGCUCGCUGCGGCGAG | 1118 |
| CasPhi32 | ACACCAAGAAGCCAGGGAAGAG | |
| R4256_ | GCUGGGGACCGAUCCUGAUUGCUCGCUGCGGCGAG | 1119 |
| CasPhi32 | ACCCUGGCUUCUUGGUGAAGAU | |
| R4257_ | GCUGGGGACCGAUCCUGAUUGCUCGCUGCGGCGAG | 1120 |
| CasPhi32 | ACUUGGUGAAGAUGAGCAGUGA | |
| R4258_ | GCUGGGGACCGAUCCUGAUUGCUCGCUGCGGCGAG | 1121 |
| CasPhi32 | ACGUGAAGAUGAGCAGUGACCU | |
| R4259_ | GCUGGGGACCGAUCCUGAUUGCUCGCUGCGGCGAG | 1122 |
| CasPhi32 | ACCCCCAUGUGGAGUACAUUGA | |
| R4260_ | GCUGGGGACCGAUCCUGAUUGCUCGCUGCGGCGAG | 1123 |
| CasPhi32 | ACCUCAAUGUACUCCACAUGGG | |
| R4261_ | GCUGGGGACCGAUCCUGAUUGCUCGCUGCGGCGAG | 1124 |
| CasPhi32 | ACAGGAAGACUCCUUUGUCUUC | |
| R4262_ | GCUGGGGACCGAUCCUGAUUGCUCGCUGCGGCGAG | 1125 |
| CasPhi32 | ACGUCUUCGCCCAGAGCAUCCC | |
| R4263_ | GCUGGGGACCGAUCCUGAUUGCUCGCUGCGGCGAG | 1126 |
| CasPhi32 | ACUCUUCGCCCAGAGCAUCCCA | |
| R4264_ | GCUGGGGACCGAUCCUGAUUGCUCGCUGCGGCGAG | 1127 |
| CasPhi32 | ACGCCCAGAGCAUCCCAUGGAA | |
| R4265_ | GCUGGGGACCGAUCCUGAUUGCUCGCUGCGGCGAG | 1128 |
| CasPhi32 | ACCAUGGGAUGCUCUGGGCGAA | |
| R4266_ | GCUGGGGACCGAUCCUGAUUGCUCGCUGCGGCGAG | 1129 |
| CasPhi32 | ACGCUCCAGGUUCCAUGGGAUG | |
| R4267_ | GCUGGGGACCGAUCCUGAUUGCUCGCUGCGGCGAG | 1130 |
| CasPhi32 | ACUCCCAGCAUGGCACCAGACA | |
| R4268_ | GCUGGGGACCGAUCCUGAUUGCUCGCUGCGGCGAG | 1131 |
| CasPhi32 | ACCUCUGUCUGGUGCCAUGCUG | |
| R4269_ | GCUGGGGACCGAUCCUGAUUGCUCGCUGCGGCGAG | 1132 |
| CasPhi32 | ACGAUACCAGCAUCCAGGGUGC | |
| R4270_ | GCUGGGGACCGAUCCUGAUUGCUCGCUGCGGCGAG | 1133 |
| CasPhi32 | ACAGGGCAGGGUCACCAUCACC | |
| R4271_ | GCUGGGGACCGAUCCUGAUUGCUCGCUGCGGCGAG | 1134 |
| CasPhi32 | ACAAGUCGGUGAUGGUGACCCU | |
| R4272_ | GCUGGGGACCGAUCCUGAUUGCUCGCUGCGGCGAG | 1135 |
| CasPhi32 | ACAACAGCGUGCCGGAGGAGGA | |
| R4273_ | GCUGGGGACCGAUCCUGAUUGCUCGCUGCGGCGAG | 1136 |
| CasPhi32 | ACGCCACACCAGCAUCCCGGCC | |
| R4274_ | GCUGGGGACCGAUCCUGAUUGCUCGCUGCGGCGAG | 1137 |
| CasPhi32 | ACAGCACACGCAGGCUGUGCAG | |
| R4275_ | GCUGGGGACCGAUCCUGAUUGCUCGCUGCGGCGAG | 1138 |
| CasPhi32 | ACACAGUUGAGCACACGCAGGC | |
| R4276_ | GCUGGGGACCGAUCCUGAUUGCUCGCUGCGGCGAG | 1139 |
| CasPhi32 | ACCCUUGACAGUUGAGCACACG | |
| R4277_ | GCUGGGGACCGAUCCUGAUUGCUCGCUGCGGCGAG | 1140 |
| CasPhi32 | ACGCUGACUCUUCCGAAUAAAC | |
| R4278_ | GCUGGGGACCGAUCCUGAUUGCUCGCUGCGGCGAG | 1141 |
| CasPhi32 | ACAUUCGGAAGAGUCAGCUAAU | |
| R4279_ | GCUGGGGACCGAUCCUGAUUGCUCGCUGCGGCGAG | 1142 |
| CasPhi32 | ACUUCGGAAGAGUCAGCUAAUC | |
| R4280_ | GCUGGGGACCGAUCCUGAUUGCUCGCUGCGGCGAG | 1143 |
| CasPhi32 | ACGGAAGAGUCAGCUAAUCCAG | |
| R4281_ | GCUGGGGACCGAUCCUGAUUGCUCGCUGCGGCGAG | 1144 |
| CasPhi32 | ACUGCUGCCCCUGGCCGGUGGG | |
| R4282_ | GCUGGGGACCGAUCCUGAUUGCUCGCUGCGGCGAG | 1145 |
| CasPhi32 | ACAGGAUGCGGCUAUACCCACC | |
| R4283_ | GCUGGGGACCGAUCCUGAUUGCUCGCUGCGGCGAG | 1146 |
| CasPhi32 | ACCCAGCUGCUGCAACCAGCAC | |
| R4284_ | GCUGGGGACCGAUCCUGAUUGCUCGCUGCGGCGAG | 1147 |
| CasPhi32 | ACCAGCAGCUGGGAACUUCCGG | |
| R4285_ | GCUGGGGACCGAUCCUGAUUGCUCGCUGCGGCGAG | 1148 |
| CasPhi32 | ACCGGGACGACGCCUGCCUCUA | |
| R4286_ | GCUGGGGACCGAUCCUGAUUGCUCGCUGCGGCGAG | 1149 |
| CasPhi32 | ACGUGGCCCCGACUGUGAUGAC | |
| R4287_ | GCUGGGGACCGAUCCUGAUUGCUCGCUGCGGCGAG | 1150 |
| CasPhi32 | ACCCUUGGGGACUUUGGGGACU | |
| R4288_ | GCUGGGGACCGAUCCUGAUUGCUCGCUGCGGCGAG | 1151 |
| CasPhi32 | ACGUCCCCAAAGUCCCCAAGGU | |
| R4289_ | GCUGGGGACCGAUCCUGAUUGCUCGCUGCGGCGAG | 1152 |
| CasPhi32 | ACGGGACUUUGGGGACUAAUUU | |
| R4290_ | GCUGGGGACCGAUCCUGAUUGCUCGCUGCGGCGAG | 1153 |
| CasPhi32 | ACGGGGACUAAUUUUGGACGCU | |
| R4291_ | GCUGGGGACCGAUCCUGAUUGCUCGCUGCGGCGAG | 1154 |
| CasPhi32 | ACGGGACUAAUUUUGGACGCUG | |
| R4292_ | GCUGGGGACCGAUCCUGAUUGCUCGCUGCGGCGAG | 1155 |
| CasPhi32 | ACUGGACGCUGUGUGGAUCUCU | |
| R4293_ | GCUGGGGACCGAUCCUGAUUGCUCGCUGCGGCGAG | 1156 |
| CasPhi32 | ACGGACGCUGUGUGGAUCUCUU | |
| R4294_ | GCUGGGGACCGAUCCUGAUUGCUCGCUGCGGCGAG | 1157 |
| CasPhi32 | ACGACGCUGUGUGGAUCUCUUU | |
| R4295_ | GCUGGGGACCGAUCCUGAUUGCUCGCUGCGGCGAG | 1158 |
| CasPhi32 | ACCCGGGGGCAAAGAGAUCCAC | |
| R4296_ | GCUGGGGACCGAUCCUGAUUGCUCGCUGCGGCGAG | 1159 |
| CasPhi32 | ACGCCCCCGGGAAGGACAUCAU | |
| R4297_ | GCUGGGGACCGAUCCUGAUUGCUCGCUGCGGCGAG | 1160 |
| CasPhi32 | ACCCCCCGGGAAGGACAUCAUC | |
| R4298_ | GCUGGGGACCGAUCCUGAUUGCUCGCUGCGGCGAG | 1161 |
| CasPhi32 | ACAUGUCACAGAGUGGGACCUC | |
| R4299_ | GCUGGGGACCGAUCCUGAUUGCUCGCUGCGGCGAG | 1162 |
| CasPhi32 | ACUGGCUCGGAUGCUGAGCCGG | |
| R4300_ | GCUGGGGACCGAUCCUGAUUGCUCGCUGCGGCGAG | 1163 |
| CasPhi32 | ACCCCUGGCCGAGCUGCGGCAG | |
| R4301_ | GCUGGGGACCGAUCCUGAUUGCUCGCUGCGGCGAG | 1164 |
| CasPhi32 | ACGUAGAGAAGUGGAUCAGCCU | |
| R4302_ | GCUGGGGACCGAUCCUGAUUGCUCGCUGCGGCGAG | 1165 |
| CasPhi32 | ACGGUAGAGAAGUGGAUCAGCC | |
| R4303_ | GCUGGGGACCGAUCCUGAUUGCUCGCUGCGGCGAG | 1166 |
| CasPhi32 | ACUCUACCAAAGACGUCAUCAA | |
| R4304_ | GCUGGGGACCGAUCCUGAUUGCUCGCUGCGGCGAG | 1167 |
| CasPhi32 | ACAUGACGUCUUUGGUAGAGAA | |
| R4305_ | GCUGGGGACCGAUCCUGAUUGCUCGCUGCGGCGAG | 1168 |
| CasPhi32 | ACCCUGAGGACCAGCAGGUGCU | |
| R4306_ | GCUGGGGACCGAUCCUGAUUGCUCGCUGCGGCGAG | 1169 |
| CasPhi32 | ACGGGGUCAGCACCUGCUGGUC | |
| R4307_ | GCUGGGGACCGAUCCUGAUUGCUCGCUGCGGCGAG | 1170 |
| CasPhi32 | ACGAGUGGGCCCCGAGUGUGCC | |
| R4308_ | GCUGGGGACCGAUCCUGAUUGCUCGCUGCGGCGAG | 1171 |
| CasPhi32 | ACUGGGGCACAGCGGGCUGUAG | |
| R4309_ | GCUGGGGACCGAUCCUGAUUGCUCGCUGCGGCGAG | 1172 |
| CasPhi32 | ACUCCAGGAGCGGGAGGCGUCG | |
| R4310_ | GCUGGGGACCGAUCCUGAUUGCUCGCUGCGGCGAG | 1173 |
| CasPhi32 | ACCAGACCUGCUGGCCUCCUAU | |
| R4311_ | GCUGGGGACCGAUCCUGAUUGCUCGCUGCGGCGAG | 1174 |
| CasPhi32 | ACAGGGCCUUGCAGACCUGCUG | |
| R4312_ | GCUGGGGACCGAUCCUGAUUGCUCGCUGCGGCGAG | 1175 |
| CasPhi32 | ACGGGGGUGAGGGUGUCUAUGC | |
| R4313_ | GCUGGGGACCGAUCCUGAUUGCUCGCUGCGGCGAG | 1176 |
| CasPhi32 | ACGGGGUGAGGGUGUCUAUGCC | |
| R4314_ | GCUGGGGACCGAUCCUGAUUGCUCGCUGCGGCGAG | 1177 |
| CasPhi32 | ACGCACGGGGAACCAGGCAGCA | |
| R4315_ | GCUGGGGACCGAUCCUGAUUGCUCGCUGCGGCGAG | 1178 |
| CasPhi32 | ACCCCGUGCCAACUGCAGCAUC | |
| R4316_ | GCUGGGGACCGAUCCUGAUUGCUCGCUGCGGCGAG | 1179 |
| CasPhi32 | ACUGGAUGCUGCAGUUGGCACG | |
| R4317_ | GCUGGGGACCGAUCCUGAUUGCUCGCUGCGGCGAG | 1180 |
| CasPhi32 | ACUGGUGGCAGUGGACAUGGGU | |
| R4318_ | GCUGGGGACCGAUCCUGAUUGCUCGCUGCGGCGAG | 1181 |
| CasPhi32 | ACCACUUCCCAAUGGAAGCUGC | |
| R4319_ | GCUGGGGACCGAUCCUGAUUGCUCGCUGCGGCGAG | 1182 |
| CasPhi32 | ACCAUUGGGAAGUGGAAGACCU | |
| R4320_ | GCUGGGGACCGAUCCUGAUUGCUCGCUGCGGCGAG | 1183 |
| CasPhi32 | ACGGAAGUGGAAGACCUUAGUG | |
| R4321_ | GCUGGGGACCGAUCCUGAUUGCUCGCUGCGGCGAG | 1184 |
| CasPhi32 | ACGUGUCCGGAGGCAGCCUGCG | |
| R4322_ | GCUGGGGACCGAUCCUGAUUGCUCGCUGCGGCGAG | 1185 |
| CasPhi32 | ACGCCACCAGGCGGCCAGUGUC | |
| R4323_ | GCUGGGGACCGAUCCUGAUUGCUCGCUGCGGCGAG | 1186 |
| CasPhi32 | ACCUGCUGCCAUGCCCCAGGGC | |
| R4324_ | GCUGGGGACCGAUCCUGAUUGCUCGCUGCGGCGAG | 1187 |
| CasPhi32 | ACCAGCCCUGGGGCAUGGCAGC | |
| R4325_ | GCUGGGGACCGAUCCUGAUUGCUCGCUGCGGCGAG | 1188 |
| CasPhi32 | ACCAUUCCAGCCCUGGGGCAUG | |
| R4326_ | GCUGGGGACCGAUCCUGAUUGCUCGCUGCGGCGAG | 1189 |
| CasPhi32 | ACGCAUUCCAGCCCUGGGGCAU | |
| R4327_ | GCUGGGGACCGAUCCUGAUUGCUCGCUGCGGCGAG | 1190 |
| CasPhi32 | ACUGCAUUCCAGCCCUGGGGCA | |
| R4328_ | GCUGGGGACCGAUCCUGAUUGCUCGCUGCGGCGAG | 1191 |
| CasPhi32 | ACAUUUUGCAUUCCAGCCCUGG | |
| R4329_ | GCUGGGGACCGAUCCUGAUUGCUCGCUGCGGCGAG | 1192 |
| CasPhi32 | ACCAUCCAGUCAGGGUCCAUCC | |
| R4330_ | GCUGGGGACCGAUCCUGAUUGCUCGCUGCGGCGAG | 1193 |
| CasPhi32 | ACUCCACGCUGUAGGCUCCCAG | |
| R4331_ | GCUGGGGACCGAUCCUGAUUGCUCGCUGCGGCGAG | 1194 |
| CasPhi32 | ACCCACACACAGGUUGUCCACG | |
| R4332_ | GCUGGGGACCGAUCCUGAUUGCUCGCUGCGGCGAG | 1195 |
| CasPhi32 | ACUCCACUGGUCCUGUCUGCUC | |
| R4333_ | GCUGGGGACCGAUCCUGAUUGCUCGCUGCGGCGAG | 1196 |
| CasPhi32 | ACCUGAAGGCCGGCUCCGGCAG | |

TABLE S
CasΦ.12 gRNAs targeting Bak1 in CHO cells

| | Repeat + spacer RNA Sequence | |
|---|---|---|
| Name | (5′→3′), shown as DNA | SEQ ID NO |
| R2452 | CTTTCAAGACTAATAGATTGCTCCTTACGAG | 1197 |
| Bak1_CasPhi12_1 | GAGACGAAGCTATGTTTTCCATCTC | |
| R2453 | CTTTCAAGACTAATAGATTGCTCCTTACGAG | 1198 |
| Bak1_CasPhi12_2 | GAGACGCAGGGGCAGCCGCCCCCTG | |
| R2454 | CTTTCAAGACTAATAGATTGCTCCTTACGAG | 1199 |
| Bak1_CasPhi12_3 | GAGACCTCCTAGAACCCAACAGGTA | |
| R2455 | CTTTCAAGACTAATAGATTGCTCCTTACGAG | 1200 |
| Bak1_CasPhi12_4 | GAGACGAAAGACCTCCTCTGTGTCC | |
| R2456 | CTTTCAAGACTAATAGATTGCTCCTTACGAG | 1201 |
| Bak1_CasPhi12_5 | GAGACTCCATCTCGGGGTTGGCAGG | |
| R2457 | CTTTCAAGACTAATAGATTGCTCCTTACGAG | 1202 |
| Bak1_CasPhi12_6 | GAGACTTCCTGATGGTGGAGATGGA | |
| R2849_Bak1_CasPhi12_ | CTTTCAAGACTAATAGATTGCTCCTTACGAG | 1203 |
| nsd_sg1 | GAGACCTGACTCCCAGCTCTGACCC | |
| R2850_Bak1_ | CTTTCAAGACTAATAGATTGCTCCTTACGAG | 1204 |
| CasPhi12_nsd_sg2 | GAGACTGGGGTCAGAGCTGGGAGTC | |
| R2851_Bak1_CasPhi12_ | CTTTCAAGACTAATAGATTGCTCCTTACGAG | 1205 |
| nsd_sg3 | GAGACGAAAGACCTCCTCTGTGTCC | |
| R2852_Bak1_ | CTTTCAAGACTAATAGATTGCTCCTTACGAG | 1206 |
| CasPhi12_nsd_sg4 | GAGACCGAAGCTATGTTTTCCATCT | |
| R2853_Bak1_ | CTTTCAAGACTAATAGATTGCTCCTTACGAG | 1207 |
| CasPhi12_nsd_sg5 | GAGACGAAGCTATGTTTTCCATCTC | |
| R2854_Bak1_ | CTTTCAAGACTAATAGATTGCTCCTTACGAG | 1208 |
| CasPhi12_nsd_sg6 | GAGACTCCATCTCCACCATCAGGAA | |
| R2855_Bak1_ | CTTTCAAGACTAATAGATTGCTCCTTACGAG | 1209 |
| CasPhi12_nsd_sg7 | GAGACCCATCTCCACCATCAGGAAC | |
| R2856_Bak1_ | CTTTCAAGACTAATAGATTGCTCCTTACGAG | 1210 |
| CasPhi12_nsd_sg8 | GAGACCTGATGGTGGAGATGGAAAA | |
| R2857_Bak1_ | CTTTCAAGACTAATAGATTGCTCCTTACGAG | 1211 |
| CasPhi12_nsd_sg9 | GAGACCATCTCCACCATCAGGAACA | |
| R2858_Bak1_ | CTTTCAAGACTAATAGATTGCTCCTTACGAG | 1212 |
| CasPhi12_nsd_sg10 | GAGACTTCCTGATGGTGGAGATGGA | |
| R2859_Bak1_ | CTTTCAAGACTAATAGATTGCTCCTTACGAG | 1213 |
| CasPhi12_nsd_sg11 | GAGACGCAGGGGCAGCCGCCCCCTG | |
| R2860_Bak1_ | CTTTCAAGACTAATAGATTGCTCCTTACGAG | 1214 |
| CasPhi12_nsd_sg12 | GAGACTCCATCTCGGGGTTGGCAGG | |
| R2861_Bak1_ | CTTTCAAGACTAATAGATTGCTCCTTACGAG | 1215 |
| CasPhi12_nsd_sg13 | GAGACTAGGAGCAAATTGTCCATCT | |
| R2862_Bak1_ | CTTTCAAGACTAATAGATTGCTCCTTACGAG | 1216 |
| CasPhi12_nsd_sg14 | GAGACGGTTCTAGGAGCAAATTGTC | |
| R2863_Bak1_ | CTTTCAAGACTAATAGATTGCTCCTTACGAG | 1217 |
| CasPhi12_nsd_sg15 | GAGACGCTCCTAGAACCCAACAGGT | |
| R2864_Bak1_ | CTTTCAAGACTAATAGATTGCTCCTTACGAG | 1218 |
| CasPhi12_nsd_sg16 | GAGACCTCCTAGAACCCAACAGGTA | |
| R3977 Bak1_ | CTTTCAAGACTAATAGATTGCTCCTTACGAG | 1219 |
| CasPhi12_exon1_sg1 | GAGACTCCAGACGCCATCTTTCAGG | |
| R3978 Bak1_ | CTTTCAAGACTAATAGATTGCTCCTTACGAG | 1220 |
| CasPhi12_exon1_sg2 | GAGACTGGTAAGAGTCCTCCTGCCC | |
| R3979 Bak1_ | CTTTCAAGACTAATAGATTGCTCCTTACGAG | 1221 |
| CasPhi12_exon3_sg1 | GAGACTTACAGCATCTTGGGTCAGG | |
| R3980 Bak1_ | CTTTCAAGACTAATAGATTGCTCCTTACGAG | 1222 |
| CasPhi12_exon3_sg2 | GAGACGGTCAGGTGGGCCGGCAGCT | |
| R3981 Bak1_ | CTTTCAAGACTAATAGATTGCTCCTTACGAG | 1223 |
| CasPhi12_exon3_sg3 | GAGACCTATCATTGGAGATGACATT | |
| R3982 Bak1_ | CTTTCAAGACTAATAGATTGCTCCTTACGAG | 1224 |
| CasPhi12_exon3_sg4 | GAGACGAGATGACATTAACCGGAGA | |
| R3983 Bak1_ | CTTTCAAGACTAATAGATTGCTCCTTACGAG | 1225 |
| CasPhi12_exon3_sg5 | GAGACTGGAACTCTGTGTCGTATCT | |
| R3984 Bak1_ | CTTTCAAGACTAATAGATTGCTCCTTACGAG | 1226 |
| CasPhi12_exon3_sg6 | GAGACCAGAATTTACTGGAGCAGCT | |
| R3985 Bak1_ | CTTTCAAGACTAATAGATTGCTCCTTACGAG | 1227 |
| CasPhi12_exon3_sg7 | GAGACACTGGAGCAGCTGCAGCCCA | |
| R3986 Bak1_ | CTTTCAAGACTAATAGATTGCTCCTTACGAG | 1228 |
| CasPhi12_exon3_sg8 | GAGACCCAGCTGTGGGCTGCAGCTG | |
| R3987 Bak1_ | CTTTCAAGACTAATAGATTGCTCCTTACGAG | 1229 |
| CasPhi12_exon3_sg9 | GAGACGTAGGCATTCCCAGCTGTGG | |
| R3988 Bak1_ | CTTTCAAGACTAATAGATTGCTCCTTACGAG | 1230 |
| CasPhi12_exon3_sg10 | GAGACGTGAAGAGTTCGTAGGCATT | |
| R3989 Bak1_ | CTTTCAAGACTAATAGATTGCTCCTTACGAG | 1231 |
| CasPhi12_exon3_sg11 | GAGACACCAAGATTGCCTCCAGGTA | |
| R3990 Bak1_ | CTTTCAAGACTAATAGATTGCTCCTTACGAG | 1232 |
| CasPhi12_exon3_sg12 | GAGACCCTCCAGGTACCCACCACCA | |

TABLE T
CasΦ.32 gRNAs targeting Bak1 in CHO cells

| | Repeat + spacer RNA Sequence | |
|---|---|---|
| Name | (5′→3′), shown as DNA | SEQ ID NO |
| R2452 | GCTGGGGACCGATCCTGATTGCTCGCTGCGG | 1233 |
| Bak1_CasPhi32_1 | CGAGACGAAGCTATGTTTTCCATCTC | |
| R2453 | GCTGGGGACCGATCCTGATTGCTCGCTGCGG | 1234 |
| Bak1_CasPhi32_2 | CGAGACGCAGGGGCAGCCGCCCCCTG | |
| R2454 | GCTGGGGACCGATCCTGATTGCTCGCTGCGG | 1235 |
| Bak1_CasPhi32_3 | CGAGACCTCCTAGAACCCAACAGGTA | |
| R2455 | GCTGGGGACCGATCCTGATTGCTCGCTGCGG | 1236 |
| Bak1_CasPhi32_4 | CGAGACGAAAGACCTCCTCTGTGTCC | |
| R2456 | GCTGGGGACCGATCCTGATTGCTCGCTGCGG | 1237 |
| Bak1_CasPhi32_5 | CGAGACTCCATCTCGGGGTTGGCAGG | |
| R2457 | GCTGGGGACCGATCCTGATTGCTCGCTGCGG | 1238 |
| Bak1_CasPhi32_6 | CGAGACTTCCTGATGGTGGAGATGGA | |
| R2849_Bak1_CasPhi32_ | GCTGGGGACCGATCCTGATTGCTCGCTGCGG | 1239 |
| nsd_sg1 | CGAGACCTGACTCCCAGCTCTGACCC | |
| R2850_Bak1_CasPhi32_ | GCTGGGGACCGATCCTGATTGCTCGCTGCGG | 1240 |
| nsd_sg2 | CGAGACTGGGGTCAGAGCTGGGAGTC | |
| R2851_Bak1_ | GCTGGGGACCGATCCTGATTGCTCGCTGCGG | 1241 |
| CasPhi32_nsd_sg3 | CGAGACGAAAGACCTCCTCTGTGTCC | |
| R2852_Bak1 | GCTGGGGACCGATCCTGATTGCTCGCTGCGG | 1242 |
| CasPhi321nsd_sg4 | CGAGACCGAAGCTATGTTTTCCATCT | |
| R2853_Bak1_ | GCTGGGGACCGATCCTGATTGCTCGCTGCGG | 1243 |
| CasPhi32_nsd_sg5 | CGAGACGAAGCTATGTTTTCCATCTC | |
| R2854_Bak1_ | GCTGGGGACCGATCCTGATTGCTCGCTGCGG | 1244 |
| CasPhi32_nsd_sg6 | CGAGACTCCATCTCCACCATCAGGAA | |
| R2855_Bak1_ | GCTGGGGACCGATCCTGATTGCTCGCTGCGG | 1245 |
| CasPhi32_nsd_sg7 | CGAGACCCATCTCCACCATCAGGAAC | |
| R2856_Bak1_ | GCTGGGGACCGATCCTGATTGCTCGCTGCGG | 1246 |
| CasPhi32_nsd_sg8 | CGAGACCTGATGGTGGAGATGGAAAA | |
| R2857_Bak1_ | GCTGGGGACCGATCCTGATTGCTCGCTGCGG | 1247 |
| CasPhi32_nsd_sg9 | CGAGACCATCTCCACCATCAGGAACA | |
| R2858_Bak1_ | GCTGGGGACCGATCCTGATTGCTCGCTGCGG | 1248 |
| CasPhi32_nsd_sg10 | CGAGACTTCCTGATGGTGGAGATGGA | |
| R2859_Bak1_ | GCTGGGGACCGATCCTGATTGCTCGCTGCGG | 1249 |
| CasPhi32_nsd_sg11 | CGAGACGCAGGGGCAGCCGCCCCCTG | |
| R2860_Bak1_ | GCTGGGGACCGATCCTGATTGCTCGCTGCGG | 1250 |
| CasPhi32_nsd_sg12 | CGAGACTCCATCTCGGGGTTGGCAGG | |
| R2861_Bak1_ | GCTGGGGACCGATCCTGATTGCTCGCTGCGG | 1251 |
| CasPhi32_nsd_sg13 | CGAGACTAGGAGCAAATTGTCCATCT | |
| R2862_Bak1_ | GCTGGGGACCGATCCTGATTGCTCGCTGCGG | 1252 |
| CasPhi32_nsd_sg14 | CGAGACGGTTCTAGGAGCAAATTGTC | |
| R2863_Bak1_ | GCTGGGGACCGATCCTGATTGCTCGCTGCGG | 1253 |
| CasPhi32_nsd_sg15 | CGAGACGCTCCTAGAACCCAACAGGT | |
| R2864_Bak1_ | GCTGGGGACCGATCCTGATTGCTCGCTGCGG | 1254 |
| CasPhi32_nsd_sg16 | CGAGACCTCCTAGAACCCAACAGGTA | |
| R3977 Bak1_ | GCTGGGGACCGATCCTGATTGCTCGCTGCGG | 1255 |
| CasPhi32_exon1_sg1 | CGAGACTCCAGACGCCATCTTTCAGG | |
| R3978 Bak1_ | GCTGGGGACCGATCCTGATTGCTCGCTGCGG | 1256 |
| CasPhi32_exon1_sg2 | CGAGACTGGTAAGAGTCCTCCTGCCC | |
| R3979 Bak1_ | GCTGGGGACCGATCCTGATTGCTCGCTGCGG | 1257 |
| CasPhi32_exon3_sg1 | CGAGACTTACAGCATCTTGGGTCAGG | |
| R3980 Bak1_ | GCTGGGGACCGATCCTGATTGCTCGCTGCGG | 1258 |
| CasPhi32_exon3_sg2 | CGAGACGGTCAGGTGGGCCGGCAGCT | |
| R3981 Bak1_ | GCTGGGGACCGATCCTGATTGCTCGCTGCGG | 1259 |
| CasPhi32_exon3_sg3 | CGAGACCTATCATTGGAGATGACATT | |
| R3982 Bak1_ | GCTGGGGACCGATCCTGATTGCTCGCTGCGG | 1260 |
| CasPhi32_exon3_sg4 | CGAGACGAGATGACATTAACCGGAGA | |
| R3983 Bak1_ | GCTGGGGACCGATCCTGATTGCTCGCTGCGG | 1261 |
| CasPhi32_exon3_sg5 | CGAGACTGGAACTCTGTGTCGTATCT | |
| R3984 Bak1_ | GCTGGGGACCGATCCTGATTGCTCGCTGCGG | 1262 |
| CasPhi32_exon3_sg6 | CGAGACCAGAATTTACTGGAGCAGCT | |
| R3985 Bak1_ | GCTGGGGACCGATCCTGATTGCTCGCTGCGG | 1263 |
| CasPhi32_exon3_sg7 | CGAGACACTGGAGCAGCTGCAGCCCA | |
| R3986 Bak1_ | GCTGGGGACCGATCCTGATTGCTCGCTGCGG | 1264 |
| CasPhi32_exon3_sg8 | CGAGACCCAGCTGTGGGCTGCAGCTG | |
| R3987 Bak1_ | GCTGGGGACCGATCCTGATTGCTCGCTGCGG | 1265 |
| CasPhi32_exon3_sg9 | CGAGACGTAGGCATTCCCAGCTGTGG | |
| R3988 Bak1_ | GCTGGGGACCGATCCTGATTGCTCGCTGCGG | 1266 |
| CasPhi32_exon3_sg10 | CGAGACGTGAAGAGTTCGTAGGCATT | |
| R3989 Bak1_ | GCTGGGGACCGATCCTGATTGCTCGCTGCGG | 1267 |
| CasPhi32_exon3_sg11 | CGAGACACCAAGATTGCCTCCAGGTA | |
| R3990 Bak1_ | GCTGGGGACCGATCCTGATTGCTCGCTGCGG | 1268 |
| CasPhi32_exon3_sg12 | CGAGACCCTCCAGGTACCCACCACCA | |

TABLE U
CasΦ.12 gRNAs targeting Bax in CHO cells

| | Repeat + spacer RNA Sequence | |
|---|---|---|
| Name | (5′→3′), shown as DNA | SEQ ID NO |
| R2458 | CTTTCAAGACTAATAGATTGCTCCTTACGAG | 1269 |
| Bax_CasPhi12_1 | GAGACCTAATGTGGATACTAACTCC | |
| R2459 | CTTTCAAGACTAATAGATTGCTCCTTACGAG | 1270 |
| BaxCasPhi12_2 | GAGACTTCCGTGTGGCAGCTGACAT | |
| R2460 | CTTTCAAGACTAATAGATTGCTCCTTACGAG | 1271 |
| BaxCasPhi12_3 | GAGACCTGATGGCAACTTCAACTGG | |
| R2461 | CTTTCAAGACTAATAGATTGCTCCTTACGAG | 1272 |
| BaxCasPhi12_4 | GAGACTACTTTGCTAGCAAACTGGT | |
| R2462 | CTTTCAAGACTAATAGATTGCTCCTTACGAG | 1273 |
| BaxCasPhi12_5 | GAGACAGCACCAGTTTGCTAGCAAA | |
| R2463 | CTTTCAAGACTAATAGATTGCTCCTTACGAG | 1274 |
| BaxCasPhi12_6 | GAGACAACTGGGGCCGGGTTGTTGC | |
| R2865_Bax_CasPhi12_ | CTTTCAAGACTAATAGATTGCTCCTTACGAG | 1275 |
| nsd_sg1 | GAGACTTCTCTTTCCTGTAGGATGA | |
| R2866_Bax_CasPhi12_ | CTTTCAAGACTAATAGATTGCTCCTTACGAG | 1276 |
| nsd_sg2 | GAGACTCTTTCCTGTAGGATGATTG | |
| R2867_Bax_ | CTTTCAAGACTAATAGATTGCTCCTTACGAG | 1277 |
| CasPhi12_nsd_sg3 | GAGACCCTGTAGGATGATTGCTAAT | |
| R2868_Bax_ | CTTTCAAGACTAATAGATTGCTCCTTACGAG | 1278 |
| CasPhi12_nsd_sg4 | GAGACCTGTAGGATGATTGCTAATG | |
| R2869_Bax_ | CTTTCAAGACTAATAGATTGCTCCTTACGAG | 1279 |
| CasPhi12_nsd_sg5 | GAGACCTAATGTGGATACTAACTCC | |
| R2870_Bax_ | CTTTCAAGACTAATAGATTGCTCCTTACGAG | 1280 |
| CasPhi12_nsd_sg6 | GAGACTTCCGTGTGGCAGCTGACAT | |
| R2871_Bax_ | CTTTCAAGACTAATAGATTGCTCCTTACGAG | 1281 |
| CasPhi12_nsd_sg7 | GAGACCGTGTGGCAGCTGACATGTT | |
| R2872_Bax_ | CTTTCAAGACTAATAGATTGCTCCTTACGAG | 1282 |
| CasPhi12_nsd_sg8 | GAGACCCATCAGCAAACATGTCAGC | |
| R2873_Bax_ | CTTTCAAGACTAATAGATTGCTCCTTACGAG | 1283 |
| CasPhi12_nsd_sg9 | GAGACAAGTTGCCATCAGCAAACAT | |
| R2874_Bax_ | CTTTCAAGACTAATAGATTGCTCCTTACGAG | 1284 |
| CasPhi12_nsd_sg10 | GAGACGCTGATGGCAACTTCAACTG | |
| R2875_Bax_ | CTTTCAAGACTAATAGATTGCTCCTTACGAG | 1285 |
| CasPhi12_nsd_sg11 | GAGACCTGATGGCAACTTCAACTGG | |
| R2876_Bax_ | CTTTCAAGACTAATAGATTGCTCCTTACGAG | 1286 |
| CasPhi12_nsd_sg12 | GAGACAACTGGGGCCGGGTTGTTGC | |
| R2877_Bax_ | CTTTCAAGACTAATAGATTGCTCCTTACGAG | 1287 |
| CasPhi12_nsd_sg13 | GAGACTTGCCCTTTTCTACTTTGCT | |
| R2878_Bax_ | CTTTCAAGACTAATAGATTGCTCCTTACGAG | 1288 |
| CasPhi12_nsd_sg14 | GAGACCCCTTTTCTACTTTGCTAGC | |
| R2879_Bax_ | CTTTCAAGACTAATAGATTGCTCCTTACGAG | 1289 |
| CasPhi12_nsd_sg15 | GAGACCTAGCAAAGTAGAAAAGGGC | |
| R2880_Bax_ | CTTTCAAGACTAATAGATTGCTCCTTACGAG | 1290 |
| CasPhi12_nsd_sg16 | GAGACGCTAGCAAAGTAGAAAAGGG | |
| R2881_Bax_ | CTTTCAAGACTAATAGATTGCTCCTTACGAG | 1291 |
| CasPhi12_nsd_sg17 | GAGACTCTACTTTGCTAGCAAACTG | |
| R2882_Bax_ | CTTTCAAGACTAATAGATTGCTCCTTACGAG | 1292 |
| CasPhi12_nsd_sg18 | GAGACCTACTTTGCTAGCAAACTGG | |
| R2883_Bax_ | CTTTCAAGACTAATAGATTGCTCCTTACGAG | 1293 |
| CasPhi12_nsd_sg19 | GAGACTACTTTGCTAGCAAACTGGT | |
| R2884_Bax_ | CTTTCAAGACTAATAGATTGCTCCTTACGAG | 1294 |
| CasPhi12_nsd_sg20 | GAGACGCTAGCAAACTGGTGCTCAA | |
| R2885_Bax_ | CTTTCAAGACTAATAGATTGCTCCTTACGAG | 1295 |
| CasPhi12_nsd_sg21 | GAGACCTAGCAAACTGGTGCTCAAG | |
| R2886_Bax_ | CTTTCAAGACTAATAGATTGCTCCTTACGAG | 1296 |
| CasPhi12_nsd_sg22 | GAGACAGCACCAGTTTGCTAGCAAA | |

TABLE V
CasΦ.32 gRNAs targeting Bax in CHO cells

| | Repeat + spacer RNA Sequence (5′→3′), | |
|---|---|---|
| Name | shown as DNA | SEQ ID NO |
| R2458 | GCTGGGGACCGATCCTGATTGCTCGCTGCG | 1297 |
| Bax_CasPhi32_1 | GCGAGACCTAATGTGGATACTAACTCC | |
| R2459 | GCTGGGGACCGATCCTGATTGCTCGCTGCG | 1298 |
| Bax_CasPhi32_2 | GCGAGACTTCCGTGTGGCAGCTGACAT | |
| R2460 | GCTGGGGACCGATCCTGATTGCTCGCTGCG | 1299 |
| Bax_CasPhi32_3 | GCGAGACCTGATGGCAACTTCAACTGG | |
| R2461 | GCTGGGGACCGATCCTGATTGCTCGCTGCG | 1300 |
| Bax_CasPhi32_4 | GCGAGACTACTTTGCTAGCAAACTGGT | |
| R2462 | GCTGGGGACCGATCCTGATTGCTCGCTGCG | 1301 |
| Bax_CasPhi32_5 | GCGAGACAGCACCAGTTTGCTAGCAAA | |
| R2463 | GCTGGGGACCGATCCTGATTGCTCGCTGCG | 1302 |
| Bax_CasPhi32_6 | GCGAGACAACTGGGGCCGGGTTGTTGC | |
| R2865_Bax_CasPhi32_ | GCTGGGGACCGATCCTGATTGCTCGCTGCG | 1303 |
| nsd_sg1 | GCGAGACTTCTCTTTCCTGTAGGATGA | |
| R2866_Bax_ | GCTGGGGACCGATCCTGATTGCTCGCTGCG | 1304 |
| CasPhi32_nsd_sg2 | GCGAGACTCTTTCCTGTAGGATGATTG | |
| R2867_Bax_ | GCTGGGGACCGATCCTGATTGCTCGCTGCG | 1305 |
| CasPhi32_nsd_sg3 | GCGAGACCCTGTAGGATGATTGCTAAT | |
| R2868_Bax_ | GCTGGGGACCGATCCTGATTGCTCGCTGCG | 1306 |
| CasPhi32_nsd_sg4 | GCGAGACCTGTAGGATGATTGCTAATG | |
| R2869_Bax_ | GCTGGGGACCGATCCTGATTGCTCGCTGCG | 1307 |
| CasPhi32_nsd_sg5 | GCGAGACCTAATGTGGATACTAACTCC | |
| R2870_Bax_ | GCTGGGGACCGATCCTGATTGCTCGCTGCG | 1308 |
| CasPhi32_nsd_sg6 | GCGAGACTTCCGTGTGGCAGCTGACAT | |
| R2871_Bax_ | GCTGGGGACCGATCCTGATTGCTCGCTGCG | 1309 |
| CasPhi32_nsd_sg7 | GCGAGACCGTGTGGCAGCTGACATGTT | |
| R2872_Bax_ | GCTGGGGACCGATCCTGATTGCTCGCTGCG | 1310 |
| CasPhi32_nsd_sg8 | GCGAGACCCATCAGCAAACATGTCAGC | |
| R2873_Bax_ | GCTGGGGACCGATCCTGATTGCTCGCTGCG | 1311 |
| CasPhi32_nsd_sg9 | GCGAGACAAGTTGCCATCAGCAAACAT | |
| R2874_Bax_ | GCTGGGGACCGATCCTGATTGCTCGCTGCG | 1312 |
| CasPhi32_nsd_sg10 | GCGAGACGCTGATGGCAACTTCAACTG | |
| R2875_Bax_ | GCTGGGGACCGATCCTGATTGCTCGCTGCG | 1313 |
| CasPhi32_nsd_sg11 | GCGAGACCTGATGGCAACTTCAACTGG | |
| R2876_Bax_ | GCTGGGGACCGATCCTGATTGCTCGCTGCG | 1314 |
| CasPhi32_nsd_sg12 | GCGAGACAACTGGGGCCGGGTTGTTGC | |
| R2877_Bax_ | GCTGGGGACCGATCCTGATTGCTCGCTGCG | 1315 |
| CasPhi32_nsd_sg13 | GCGAGACTTGCCCTTTTCTACTTTGCT | |
| R2878_Bax_ | GCTGGGGACCGATCCTGATTGCTCGCTGCG | 1316 |
| CasPhi32_nsd_sg14 | GCGAGACCCCTTTTCTACTTTGCTAGC | |
| R2879_Bax_ | GCTGGGGACCGATCCTGATTGCTCGCTGCG | 1317 |
| CasPhi32_nsd_sg15 | GCGAGACCTAGCAAAGTAGAAAAGGGC | |
| R2880_Bax_ | GCTGGGGACCGATCCTGATTGCTCGCTGCG | 1318 |
| CasPhi32_nsd_sg16 | GCGAGACGCTAGCAAAGTAGAAAAGGG | |
| R2881_Bax_ | GCTGGGGACCGATCCTGATTGCTCGCTGCG | 1319 |
| CasPhi32_nsd_sg17 | GCGAGACTCTACTTTGCTAGCAAACTG | |
| R2882_Bax_ | GCTGGGGACCGATCCTGATTGCTCGCTGCG | 1320 |
| CasPhi32_nsd_sg18 | GCGAGACCTACTTTGCTAGCAAACTGG | |
| R2883_Bax_ | GCTGGGGACCGATCCTGATTGCTCGCTGCG | 1321 |
| CasPhi32_nsd_sg19 | GCGAGACTACTTTGCTAGCAAACTGGT | |
| R2884_Bax_ | GCTGGGGACCGATCCTGATTGCTCGCTGCG | 1322 |
| CasPhi32_nsd_sg20 | GCGAGACGCTAGCAAACTGGTGCTCAA | |
| R2885_Bax_ | GCTGGGGACCGATCCTGATTGCTCGCTGCG | 1323 |
| CasPhi32_nsd_sg21 | GCGAGACCTAGCAAACTGGTGCTCAAG | |
| R2886_Bax_ | GCTGGGGACCGATCCTGATTGCTCGCTGCG | 1324 |
| CasPhi32_nsd_sg22 | GCGAGACAGCACCAGTTTGCTAGCAAA | |

TABLE W
CasΦ.12 gRNAs targeting Fut8 in CHO cells

| | Repeat + spacer RNA Sequence (5′ --> 3′), | |
|---|---|---|
| Name | shown as DNA | SEQ ID NO |
| R2464 | CTTTCAAGACTAATAGATTGCTCCTTACGAG | 1325 |
| Fut8_CasPhi12_1 | GAGACCCACTTTGTCAGTGCGTCTG | |
| R2465 | CTTTCAAGACTAATAGATTGCTCCTTACGAG | 1326 |
| Fut8_CasPhi12_2 | GAGACCTCAATGGGATGGAAGGCTG | |
| R2466 | CTTTCAAGACTAATAGATTGCTCCTTACGAG | 1327 |
| Fut8_CasPhi12_3 | GAGACAGGAATACATGGTACACGTT | |
| R2467 | CTTTCAAGACTAATAGATTGCTCCTTACGAG | 1328 |
| Fut8_CasPhi12_4 | GAGACAAGAACATTTTCAGCTTCTC | |
| R2468 | CTTTCAAGACTAATAGATTGCTCCTTACGAG | 1329 |
| Fut8_CasPhi12_5 | GAGACATCCACTTTCATTCTGCGTT | |
| R2469 | CTTTCAAGACTAATAGATTGCTCCTTACGAG | 1330 |
| Fut8_CasPhi12_6 | GAGACTTTGTTAAAGGAGGCAAAGA | |
| R2887_Fut8_CasPhi12_ | CTTTCAAGACTAATAGATTGCTCCTTACGAG | 1331 |
| nsd_sg1 | GAGACTCCCCAGAGTCCATGTCAGA | |
| R2888_Fut8_ | CTTTCAAGACTAATAGATTGCTCCTTACGAG | 1332 |
| CasPhi12_nsd_sg2 | GAGACTCAGTGCGTCTGACATGGAC | |
| R2889_Fut8_CasPhi12_ | CTTTCAAGACTAATAGATTGCTCCTTACGAG | 1333 |
| nsd_sg3 | GAGACGTCAGTGCGTCTGACATGGA | |
| R2890_Fut8_ | CTTTCAAGACTAATAGATTGCTCCTTACGAG | 1334 |
| CasPhi12_nsd_sg4 | GAGACCCACTTTGTCAGTGCGTCTG | |
| R2891_Fut8_ | CTTTCAAGACTAATAGATTGCTCCTTACGAG | 1335 |
| CasPhi12_nsd_sg5 | GAGACTGTTCCCACTTTGTCAGTGC | |
| R2892_Fut8_ | CTTTCAAGACTAATAGATTGCTCCTTACGAG | 1336 |
| CasPhi12_nsd_sg6 | GAGACCTCAATGGGATGGAAGGCTG | |
| R2893_Fut8_ | CTTTCAAGACTAATAGATTGCTCCTTACGAG | 1337 |
| CasPhi12_nsd_sg7 | GAGACCATCCCATTGAGGAATACAT | |
| R2894_Fut8_ | CTTTCAAGACTAATAGATTGCTCCTTACGAG | 1338 |
| CasPhi12_nsd_sg8 | GAGACAGGAATACATGGTACACGTT | |
| R2895_Fut8_ | CTTTCAAGACTAATAGATTGCTCCTTACGAG | 1339 |
| CasPhi12_nsd_sg9 | GAGACAACGTGTACCATGTATTCCT | |
| R2896_Fut8_ | CTTTCAAGACTAATAGATTGCTCCTTACGAG | 1340 |
| CasPhi12_nsd_sg10 | GAGACTTCAACGTGTACCATGTATT | |
| R2897_Fut8_ | CTTTCAAGACTAATAGATTGCTCCTTACGAG | 1341 |
| CasPhi12_nsd_sg11 | GAGACAAGAACATTTTCAGCTTCTC | |
| R2898_Fut8_ | CTTTCAAGACTAATAGATTGCTCCTTACGAG | 1342 |
| CasPhi12_nsd_sg12 | GAGACGAGAAGCTGAAAATGTTCTT | |
| R2899_Fut8_ | CTTTCAAGACTAATAGATTGCTCCTTACGAG | 1343 |
| CasPhi12_nsd_sg13 | GAGACTCAGCTTCTCGAACGCAGAA | |
| R2900_Fut8_ | CTTTCAAGACTAATAGATTGCTCCTTACGAG | 1344 |
| CasPhi12_nsd_sg14 | GAGACCAGCTTCTCGAACGCAGAAT | |
| R2901_Fut8_ | CTTTCAAGACTAATAGATTGCTCCTTACGAG | 1345 |
| CasPhi12_nsd_sg15 | GAGACTGCGTTCGAGAAGCTGAAAA | |
| R2902_Fut8_ | CTTTCAAGACTAATAGATTGCTCCTTACGAG | 1346 |
| CasPhi12_nsd_sg16 | GAGACAGCTTCTCGAACGCAGAATG | |
| R2903_Fut8_ | CTTTCAAGACTAATAGATTGCTCCTTACGAG | 1347 |
| CasPhi12_nsd_sg17 | GAGACATTCTGCGTTCGAGAAGCTG | |
| R2904_Fut8_ | CTTTCAAGACTAATAGATTGCTCCTTACGAG | 1348 |
| CasPhi12_nsd_sg18 | GAGACCATTCTGCGTTCGAGAAGCT | |
| R2905_Fut8_ | CTTTCAAGACTAATAGATTGCTCCTTACGAG | 1349 |
| CasPhi12_nsd_sg19 | GAGACTCGAACGCAGAATGAAAGTG | |
| R2906_Fut8_ | CTTTCAAGACTAATAGATTGCTCCTTACGAG | 1350 |
| CasPhi12_nsd_sg20 | GAGACATCCACTTTCATTCTGCGTT | |
| R2907_Fut8_ | CTTTCAAGACTAATAGATTGCTCCTTACGAG | 1351 |
| CasPhi12_nsd_sg21 | GAGACTATCCACTTTCATTCTGCGT | |
| R2908_Fut8_ | CTTTCAAGACTAATAGATTGCTCCTTACGAG | 1352 |
| CasPhi12_nsd_sg22 | GAGACTTATCCACTTTCATTCTGCG | |
| R2909_Fut8_ | CTTTCAAGACTAATAGATTGCTCCTTACGAG | 1353 |
| CasPhi12_nsd_sg23 | GAGACTTTATCCACTTTCATTCTGC | |
| R2910_Fut8_ | CTTTCAAGACTAATAGATTGCTCCTTACGAG | 1354 |
| CasPhi12_nsd_sg24 | GAGACTTTTATCCACTTTCATTCTG | |
| R2911_Fut8_ | CTTTCAAGACTAATAGATTGCTCCTTACGAG | 1355 |
| CasPhi12_nsd_sg25 | GAGACAACAAAGAAGGGTCATCAGT | |
| R2912_Fut8_ | CTTTCAAGACTAATAGATTGCTCCTTACGAG | 1356 |
| CasPhi12_nsd_sg26 | GAGACCCTCCTTTAACAAAGAAGGG | |
| R2913_Fut8_ | CTTTCAAGACTAATAGATTGCTCCTTACGAG | 1357 |
| CasPhi12_nsd_sg27 | GAGACGCCTCCTTTAACAAAGAAGG | |
| R2914_Fut8_ | CTTTCAAGACTAATAGATTGCTCCTTACGAG | 1358 |
| CasPhi12_nsd_sg28 | GAGACTTTGTTAAAGGAGGCAAAGA | |
| R2915_Fut8_ | CTTTCAAGACTAATAGATTGCTCCTTACGAG | 1359 |
| CasPhi12_nsd_sg29 | GAGACGTTAAAGGAGGCAAAGACAA | |
| R2916_Fut8_ | CTTTCAAGACTAATAGATTGCTCCTTACGAG | 1360 |
| CasPhi12_nsd_sg30 | GAGACTTAAAGGAGGCAAAGACAAA | |
| R2917_Fut8_ | CTTTCAAGACTAATAGATTGCTCCTTACGAG | 1361 |
| CasPhi12_nsd_sg31 | GAGACTCTTTGCCTCCTTTAACAAA | |
| R2918_Fut8_ | CTTTCAAGACTAATAGATTGCTCCTTACGAG | 1362 |
| CasPhi12_nsd_sg32 | GAGACGTCTTTGCCTCCTTTAACAA | |
| R2919_Fut8_ | CTTTCAAGACTAATAGATTGCTCCTTACGAG | 1363 |
| CasPhi12_nsd_sg33 | GAGACGTCTAACTTACTTTGTCTTT | |
| R2920_Fut8_ | CTTTCAAGACTAATAGATTGCTCCTTACGAG | 1364 |
| CasPhi12_nsd_sg34 | GAGACTTGGTCTAACTTACTTTGTC | |

TABLE X
CasΦ.32 gRNAs targeting Fut8 in CHO cells

| | Repeat + spacer RNA Sequence | |
|---|---|---|
| Name | (5′ --> 3′), shown as DNA | SEQ ID NO |
| R2464 | GCTGGGGACCGATCCTGATTGCTCGCTGCG | 1365 |
| Fut8_CasPhi32_1 | GCGAGACCCACTTTGTCAGTGCGTCTG | |
| R2465 | GCTGGGGACCGATCCTGATTGCTCGCTGCG | 1366 |
| Fut8_CasPhi32_2 | GCGAGACCTCAATGGGATGGAAGGCTG | |
| R2466 | GCTGGGGACCGATCCTGATTGCTCGCTGCG | 1367 |
| Fut8_CasPhi32_3 | GCGAGACAGGAATACATGGTACACGTT | |
| R2467 | GCTGGGGACCGATCCTGATTGCTCGCTGCG | 1368 |
| Fut8_CasPhi32_4 | GCGAGACAAGAACATTTTCAGCTTCTC | |
| R2468 | GCTGGGGACCGATCCTGATTGCTCGCTGCG | 1369 |
| Fut8_CasPhi32_5 | GCGAGACATCCACTTTCATTCTGCGTT | |
| R2469 | GCTGGGGACCGATCCTGATTGCTCGCTGCG | 1370 |
| Fut8_CasPhi32_6 | GCGAGACTTTGTTAAAGGAGGCAAAGA | |
| R2887_Fut8_CasPhi32_ | GCTGGGGACCGATCCTGATTGCTCGCTGCG | 1371 |
| nsd_sg1 | GCGAGACTCCCCAGAGTCCATGTCAGA | |
| R2888_Fut8_ | GCTGGGGACCGATCCTGATTGCTCGCTGCG | 1372 |
| CasPhi32_nsd_sg2 | GCGAGACTCAGTGCGTCTGACATGGAC | |
| R2889_Fut8_ | GCTGGGGACCGATCCTGATTGCTCGCTGCG | 1373 |
| CasPhi32_nsd_sg3 | GCGAGACGTCAGTGCGTCTGACATGGA | |
| R2890_Fut8_ | GCTGGGGACCGATCCTGATTGCTCGCTGCG | 1374 |
| CasPhi32_nsd_sg4 | GCGAGACCCACTTTGTCAGTGCGTCTG | |
| R2891_Fut8_ | GCTGGGGACCGATCCTGATTGCTCGCTGCG | 1375 |
| CasPhi32_nsd_sg5 | GCGAGACTGTTCCCACTTTGTCAGTGC | |
| R2892_Fut8_ | GCTGGGGACCGATCCTGATTGCTCGCTGCG | 1376 |
| CasPhi32_nsd_sg6 | GCGAGACCTCAATGGGATGGAAGGCTG | |
| R2893_Fut8_ | GCTGGGGACCGATCCTGATTGCTCGCTGCG | 1377 |
| CasPhi32_nsd_sg7 | GCGAGACCATCCCATTGAGGAATACAT | |
| R2894_Fut8_ | GCTGGGGACCGATCCTGATTGCTCGCTGCG | 1378 |
| CasPhi32_nsd_sg8 | GCGAGACAGGAATACATGGTACACGTT | |
| R2895_Fut8_ | GCTGGGGACCGATCCTGATTGCTCGCTGCG | 1379 |
| CasPhi32_nsd_sg9 | GCGAGACAACGTGTACCATGTATTCCT | |
| R2896_Fut8_ | GCTGGGGACCGATCCTGATTGCTCGCTGCG | 1380 |
| CasPhi32_nsd_sg10 | GCGAGACTTCAACGTGTACCATGTATT | |
| R2897_Fut8_ | GCTGGGGACCGATCCTGATTGCTCGCTGCG | 1381 |
| CasPhi32_nsd_sg11 | GCGAGACAAGAACATTTTCAGCTTCTC | |
| R2898_Fut8_ | GCTGGGGACCGATCCTGATTGCTCGCTGCG | 1382 |
| CasPhi32_nsd_sg12 | GCGAGACGAGAAGCTGAAAATGTTCTT | |
| R2899_Fut8_ | GCTGGGGACCGATCCTGATTGCTCGCTGCG | 1383 |
| CasPhi32_nsd_sg13 | GCGAGACTCAGCTTCTCGAACGCAGAA | |
| R2900_Fut8_ | GCTGGGGACCGATCCTGATTGCTCGCTGCG | 1384 |
| CasPhi32_nsd_sg14 | GCGAGACCAGCTTCTCGAACGCAGAAT | |
| R2901_Fut8_ | GCTGGGGACCGATCCTGATTGCTCGCTGCG | 1385 |
| CasPhi32_nsd_sg15 | GCGAGACTGCGTTCGAGAAGCTGAAAA | |
| R2902_Fut8_ | GCTGGGGACCGATCCTGATTGCTCGCTGCG | 1386 |
| CasPhi32_nsd_sg16 | GCGAGACAGCTTCTCGAACGCAGAATG | |
| R2903_Fut8_ | GCTGGGGACCGATCCTGATTGCTCGCTGCG | 1387 |
| CasPhi32_nsd_sg17 | GCGAGACATTCTGCGTTCGAGAAGCTG | |
| R2904_Fut8_ | GCTGGGGACCGATCCTGATTGCTCGCTGCG | 1388 |
| CasPhi32_nsd_sg18 | GCGAGACCATTCTGCGTTCGAGAAGCT | |
| R2905_Fut8_ | GCTGGGGACCGATCCTGATTGCTCGCTGCG | 1389 |
| CasPhi32_nsd_sg19 | GCGAGACTCGAACGCAGAATGAAAGTG | |
| R2906_Fut8_ | GCTGGGGACCGATCCTGATTGCTCGCTGCG | 1390 |
| CasPhi32_ | GCGAGACATCCACTTTCATTCTGCGTT | |
| CasPhi32_nsd_sg20 | | |
| R2907_Fut8_ | GCTGGGGACCGATCCTGATTGCTCGCTGCG | 1391 |
| CasPhi32_nsd_sg21 | GCGAGACTATCCACTTTCATTCTGCGT | |
| R2908_Fut8_ | GCTGGGGACCGATCCTGATTGCTCGCTGCG | 1392 |
| CasPhi32_nsd_sg22 | GCGAGACTTATCCACTTTCATTCTGCG | |
| R2909_Fut8_ | GCTGGGGACCGATCCTGATTGCTCGCTGCG | 1393 |
| CasPhi32_nsd_sg23 | GCGAGACTTTATCCACTTTCATTCTGC | |
| R2910_Fut8_ | GCTGGGGACCGATCCTGATTGCTCGCTGCG | 1394 |
| CasPhi32_nsd_sg24 | GCGAGACTTTTATCCACTTTCATTCTG | |
| R2911_Fut8_ | GCTGGGGACCGATCCTGATTGCTCGCTGCG | 1395 |
| CasPhi32_nsd_sg25 | GCGAGACAACAAAGAAGGGTCATCAGT | |
| R2912_Fut8_ | GCTGGGGACCGATCCTGATTGCTCGCTGCG | 1396 |
| CasPhi32_nsd_sg26 | GCGAGACCCTCCTTTAACAAAGAAGGG | |
| R2913_Fut8_ | GCTGGGGACCGATCCTGATTGCTCGCTGCG | 1397 |
| CasPhi32_nsd_sg27 | GCGAGACGCCTCCTTTAACAAAGAAGG | |
| R2914_Fut8_ | GCTGGGGACCGATCCTGATTGCTCGCTGCG | 1398 |
| CasPhi32_nsd_sg28 | GCGAGACTTTGTTAAAGGAGGCAAAGA | |
| R2915_Fut8_ | GCTGGGGACCGATCCTGATTGCTCGCTGCG | 1399 |
| CasPhi32_nsd_sg29 | GCGAGACGTTAAAGGAGGCAAAGACAA | |
| R2916_Fut8_ | GCTGGGGACCGATCCTGATTGCTCGCTGCG | 1400 |
| CasPhi32_nsd_sg30 | GCGAGACTTAAAGGAGGCAAAGACAAA | |
| R2917_Fut8_ | GCTGGGGACCGATCCTGATTGCTCGCTGCG | 1401 |
| CasPhi32_nsd_sg31 | GCGAGACTCTTTGCCTCCTTTAACAAA | |
| R2918_Fut8_ | GCTGGGGACCGATCCTGATTGCTCGCTGCG | 1402 |
| CasPhi32_nsd_sg32 | GCGAGACGTCTTTGCCTCCTTTAACAA | |
| R2919_Fut8_ | GCTGGGGACCGATCCTGATTGCTCGCTGCG | 1403 |
| CasPhi32_nsd_sg33 | GCGAGACGTCTAACTTACTTTGTCTTT | |
| R2920_Fut8_ | GCTGGGGACCGATCCTGATTGCTCGCTGCG | 1404 |
| CasPhi32_nsd_sg34 | GCGAGACTTGGTCTAACTTACTTTGTC | |

TABLE Y
CasΦ.12 gRNAs targeting human TRAC in T cells

| | Repeat + spacer RNA Sequence | |
|---|---|---|
| Name | (5′ --> 3′), shown as DNA | SEQ ID NO |
| R3040_CasPhi12_S | ATTGCTCCTTACGAGGAGACTGGATATCTGT | 1533 |
| | GGGACA | |
| R3041_CasPhi12_S | ATTGCTCCTTACGAGGAGACTCCCACAGATA | 1534 |
| | TCCAGA | |
| R3042_CasPhi12_S | ATTGCTCCTTACGAGGAGACGAGTCTCTCAG | 1535 |
| | CTGGTA | |
| R3043_CasPhi12_S | ATTGCTCCTTACGAGGAGACAGAGTCTCTCA | 1536 |
| | GCTGGT | |
| R3044_CasPhi12_S | ATTGCTCCTTACGAGGAGACTCACTGGATTT | 1537 |
| | AGAGTC | |
| R3045_CasPhi12_S | ATTGCTCCTTACGAGGAGACAGAATCAAAAT | 1538 |
| | CGGTGA | |
| R3046_CasPhi12_S | ATTGCTCCTTACGAGGAGACGAGAATCAAAA | 1539 |
| | TCGGTG | |
| R3047_CasPhi12_S | ATTGCTCCTTACGAGGAGACACCGATTTTGA | 1540 |
| | TTCTCA | |
| R3048_CasPhi12_S | ATTGCTCCTTACGAGGAGACTTTGAGAATCA | 1541 |
| | AAATCG | |
| R3049_CasPhi12_S | ATTGCTCCTTACGAGGAGACGTTTGAGAATC | 1542 |
| | AAAATC | |
| R3050_CasPhi12_S | ATTGCTCCTTACGAGGAGACTGATTCTCAAA | 1543 |
| | CAAATG | |
| R3051_CasPhi12_S | ATTGCTCCTTACGAGGAGACGATTCTCAAAC | 1544 |
| | AAATGT | |
| R3052_CasPhi12_S | ATTGCTCCTTACGAGGAGACATTCTCAAACA | 1545 |
| | AATGTG | |
| R3053_CasPhi12_S | ATTGCTCCTTACGAGGAGACTGACACATTTG | 1546 |
| | TTTGAG | |
| R3054_CasPhi12_S | ATTGCTCCTTACGAGGAGACTCAAACAAATG | 1547 |
| | TGTCAC | |
| R3055_CasPhi12_S | ATTGCTCCTTACGAGGAGACGTGACACATTT | 1548 |
| | GTTTGA | |
| R3056_CasPhi12_S | ATTGCTCCTTACGAGGAGACCTTTGTGACAC | 1549 |
| | ATTTGT | |
| R3057_CasPhi12_S | ATTGCTCCTTACGAGGAGACTGATGTGTATA | 1550 |
| | TCACAG | |
| R3058_CasPhi12_S | ATTGCTCCTTACGAGGAGACTCTGTGATATA | 1551 |
| | CACATC | |
| R3059_CasPhi12_S | ATTGCTCCTTACGAGGAGACGTCTGTGATAT | 1552 |
| | ACACAT | |
| R3060_CasPhi12_S | ATTGCTCCTTACGAGGAGACTGTCTGTGATA | 1553 |
| | TACACA | |
| R3061_CasPhi12_S | ATTGCTCCTTACGAGGAGACAAGTCCATAGA | 1554 |
| | CCTCAT | |
| R3062_CasPhi12_S | ATTGCTCCTTACGAGGAGACCTCTTGAAGTC | 1555 |
| | CATAGA | |
| R3063_CasPhi12_S | ATTGCTCCTTACGAGGAGACAAGAGCAACAG | 1556 |
| | TGCTGT | |
| R3064_CasPhi12_S | ATTGCTCCTTACGAGGAGACCTCCAGGCCAC | 1557 |
| | AGCACT | |
| R3065_CasPhi12_S | ATTGCTCCTTACGAGGAGACTTGCTCCAGGC | 1558 |
| | CACAGC | |
| R3066_CasPhi12_S | ATTGCTCCTTACGAGGAGACGTTGCTCCAGG | 1559 |
| | CCACAG | |
| R3067_CasPhi12_S | ATTGCTCCTTACGAGGAGACCACATGCAAAG | 1560 |
| | TCAGAT | |
| R3068_CasPhi12_S | ATTGCTCCTTACGAGGAGACGCACATGCAAA | 1561 |
| | GTCAGA | |
| R3069_CasPhi12_S | ATTGCTCCTTACGAGGAGACGCATGTGCAAA | 1562 |
| | CGCCTT | |
| R3070_CasPhi12_S | ATTGCTCCTTACGAGGAGACAAGGCGTTTGC | 1563 |
| | ACATGC | |
| R3071_CasPhi12_S | ATTGCTCCTTACGAGGAGACCATGTGCAAAC | 1564 |
| | GCCTTC | |
| R3072_CasPhi12_S | ATTGCTCCTTACGAGGAGACTTGAAGGCGTT | 1565 |
| | TGCACA | |
| R3073_CasPhi12_S | ATTGCTCCTTACGAGGAGACAACAACAGCAT | 1566 |
| | TATTCC | |
| R3074_CasPhi12_S | ATTGCTCCTTACGAGGAGACTGGAATAATGC | 1567 |
| | TGTTGT | |
| R3075_CasPhi12_S | ATTGCTCCTTACGAGGAGACTTCCAGAAGAC | 1568 |
| | ACCTTC | |
| R3076_CasPhi12_S | ATTGCTCCTTACGAGGAGACCAGAAGACACC | 1569 |
| | TTCTTC | |
| R3077_CasPhi12_S | ATTGCTCCTTACGAGGAGACCCTGGGCTGGG | 1570 |
| | GAAGAA | |
| R3078_CasPhi12_S | ATTGCTCCTTACGAGGAGACTTCCCCAGCCC | 1571 |
| | AGGTAA | |
| R3079_CasPhi12_S | ATTGCTCCTTACGAGGAGACCCCAGCCCAGG | 1572 |
| | TAAGGG | |
| R3080_CasPhi12_S | ATTGCTCCTTACGAGGAGACTAAAAGGAAAA | 1573 |
| | ACAGAC | |
| R3081_CasPhi12_S | ATTGCTCCTTACGAGGAGACCTAAAAGGAAA | 1574 |
| | AACAGA | |
| R3082_CasPhi12_S | ATTGCTCCTTACGAGGAGACTTCCTTTTAGAA | 1575 |
| | AGTTC | |
| R3083_CasPhi12_S | ATTGCTCCTTACGAGGAGACTCCTTTTAGAA | 1576 |
| | AGTTCC | |
| R3084_CasPhi12_S | ATTGCTCCTTACGAGGAGACCCTTTTAGAAA | 1577 |
| | GTTCCT | |
| R3085_CasPhi12_S | ATTGCTCCTTACGAGGAGACCTTTTAGAAAG | 1578 |
| | TTCCTG | |
| R3086_CasPhi12_S | ATTGCTCCTTACGAGGAGACTAGAAAGTTCC | 1579 |
| | TGTGAT | |
| R3136_CasPhi12_S | ATTGCTCCTTACGAGGAGACAGAAAGTTCCT | 1580 |
| | GTGATG | |
| R3137_CasPhi12_S | ATTGCTCCTTACGAGGAGACGAAAGTTCCTG | 1581 |
| | TGATGT | |
| R3138_CasPhi12_S | ATTGCTCCTTACGAGGAGACACATCACAGGA | 1582 |
| | ACTTTC | |
| R3139_CasPhi12_S | ATTGCTCCTTACGAGGAGACCTGTGATGTCA | 1583 |
| | AGCTGG | |
| R3140_CasPhi12_S | ATTGCTCCTTACGAGGAGACTCGACCAGCTT | 1584 |
| | GACATC | |
| R3141_CasPhi12_S | ATTGCTCCTTACGAGGAGACCTCGACCAGCT | 1585 |
| | TGACAT | |
| R3142_CasPhi12_S | ATTGCTCCTTACGAGGAGACTCTCGACCAGC | 1586 |
| | TTGACA | |
| R3143_CasPhi12_S | ATTGCTCCTTACGAGGAGACAAAGCTTTTCT | 1587 |
| | CGACCA | |
| R3144_CasPhi12_S | ATTGCTCCTTACGAGGAGACCAAAGCTTTTC | 1588 |
| | TCGACC | |
| R3145_CasPhi12_S | ATTGCTCCTTACGAGGAGACCCTGTTTCAAA | 1589 |
| | GCTTTT | |
| R3146_CasPhi12_S | ATTGCTCCTTACGAGGAGACGAAACAGGTAA | 1590 |
| | GACAGG | |
| R3147_CasPhi12_S | ATTGCTCCTTACGAGGAGACAAACAGGTAAG | 1591 |
| | ACAGGG | |

TABLE Z
CasΦ.12 gRNAs targeting human B2M in T cells

| | Repeat + spacer RNA Sequence | |
|---|---|---|
| Name | (5′ --> 3′), shown as DNA | SEQ ID NO |
| R3115_CasPhi12_S | ATTGCTCCTTACGAGGAGACCATCCATCCGA | 1592 |
| | CATTGA | |
| R3116_CasPhi12_S | ATTGCTCCTTACGAGGAGACATCCATCCGAC | 1593 |
| | ATTGAA | |
| R3117_CasPhi12_S | ATTGCTCCTTACGAGGAGACAGTAAGTCAAC | 1594 |
| | TTCAAT | |
| R3118_CasPhi12_S | ATTGCTCCTTACGAGGAGACTTCAGTAAGTC | 1595 |
| | AACTTC | |
| R3119_CasPhi12_S | ATTGCTCCTTACGAGGAGACAAGTTGACTTA | 1596 |
| | CTGAAG | |
| R3120_CasPhi12_S | ATTGCTCCTTACGAGGAGACACTTACTGAAG | 1597 |
| | AATGGA | |
| R3121_CasPhi12_S | ATTGCTCCTTACGAGGAGACTCTCTCCATTCT | 1598 |
| | TCAGT | |
| R3122_CasPhi12_S | ATTGCTCCTTACGAGGAGACCTGAAGAATGG | 1599 |
| | AGAGAG | |
| R3123_CasPhi12_S | ATTGCTCCTTACGAGGAGACAATTCTCTCTCC | 1600 |
| | ATTCT | |
| R3124_CasPhi12_S | ATTGCTCCTTACGAGGAGACCAATTCTCTCTC | 1601 |
| | CATTC | |
| R3125_CasPhi12_S | ATTGCTCCTTACGAGGAGACTCAATTCTCTCT | 1602 |
| | CCATT | |
| R3126_CasPhi12_S | ATTGCTCCTTACGAGGAGACTTCAATTCTCTC | 1603 |
| | TCCAT | |
| R3127_CasPhi12_S | ATTGCTCCTTACGAGGAGACAAAAAGTGGAG | 1604 |
| | CATTCA | |
| R3128_CasPhi12_S | ATTGCTCCTTACGAGGAGACCTGAAAGACAA | 1605 |
| | GTCTGA | |
| R3129_CasPhi12_S | ATTGCTCCTTACGAGGAGACAGACTTGTCTTT | 1606 |
| | CAGCA | |
| R3130_CasPhi12_S | ATTGCTCCTTACGAGGAGACTCTTTCAGCAA | 1607 |
| | GGACTG | |
| R3131_CasPhi12_S | ATTGCTCCTTACGAGGAGACCAGCAAGGACT | 1608 |
| | GGTCTT | |
| R3132_CasPhi12_S | ATTGCTCCTTACGAGGAGACAGCAAGGACTG | 1609 |
| | GTCTTT | |
| R3133_CasPhi12_S | ATTGCTCCTTACGAGGAGACCTATCTCTTGTA | 1610 |
| | CTACA | |
| R3134_CasPhi12_S | ATTGCTCCTTACGAGGAGACTATCTCTTGTAC | 1611 |
| | TACAC | |
| R3135_CasPhi12_S | ATTGCTCCTTACGAGGAGACAGTGTAGTACA | 1612 |
| | AGAGAT | |
| R3148_CasPhi12_S | ATTGCTCCTTACGAGGAGACTACTACACTGA | 1613 |
| | ATTCAC | |
| R3149_CasPhi12_S | ATTGCTCCTTACGAGGAGACAGTGGGGGTGA | 1614 |
| | ATTCAG | |
| R3150_CasPhi12_S | ATTGCTCCTTACGAGGAGACCAGTGGGGGTG | 1615 |
| | AATTCA | |
| R3151_CasPhi12_S | ATTGCTCCTTACGAGGAGACTCAGTGGGGGT | 1616 |
| | GAATTC | |
| R3152_CasPhi12_S | ATTGCTCCTTACGAGGAGACTTCAGTGGGGG | 1617 |
| | TGAATT | |
| R3153_CasPhi12_S | ATTGCTCCTTACGAGGAGACACCCCCACTGA | 1618 |
| | AAAAGA | |
| R3154_CasPhi12_S | ATTGCTCCTTACGAGGAGACACACGGCAGGC | 1619 |
| | ATACTC | |
| R3155_CasPhi12_S | ATTGCTCCTTACGAGGAGACGGCTGTGACAA | 1620 |
| | AGTCAC | |
| R3156_CasPhi12_S | ATTGCTCCTTACGAGGAGACGTCACAGCCCA | 1621 |
| | AGATAG | |
| R3157_CasPhi12_S | ATTGCTCCTTACGAGGAGACTCACAGCCCAA | 1622 |
| | GATAGT | |
| R3158_CasPhi12_S | ATTGCTCCTTACGAGGAGACACTATCTTGGG | 1623 |
| | CTGTGA | |
| R3159_CasPhi12_S | ATTGCTCCTTACGAGGAGACCCCCACTTAAC | 1624 |
| | TATCTT | |

TABLE AA
CasΦ.12 gRNAs targeting human PD1 in T cells

| Name | Repeat + spacer RNA Sequence (5′ --> 3′) | SEQ ID NO |
|---|---|---|
| R2921_CasPhi12_S | AUUGCUCCUUACGAGGAGACCCUUCCGC | 1625 |
| | UCACCUCCG | |
| R2922_CasPhi12_S | AUUGCUCCUUACGAGGAGACCCUUCCGC | 1626 |
| | UCACCUCCG | |
| R2923_CasPhi12_S | AUUGCUCCUUACGAGGAGACCGCUCACC | 1627 |
| | UCCGCCUGA | |
| R2924_CasPhi12_S | AUUGCUCCUUACGAGGAGACUCCACUGC | 1628 |
| | UCAGGCGGA | |
| R2925_CasPhi12_S | AUUGCUCCUUACGAGGAGACUAGCACCG | 1629 |
| | CCCAGACGA | |
| R2926_CasPhi12_S | AUUGCUCCUUACGAGGAGACAGGCAUGC | 1630 |
| | AGAUCCCAC | |
| R2927_CasPhi12_S | AUUGCUCCUUACGAGGAGACCACAGGCG | 1631 |
| | CCCUGGCCA | |
| R2928_CasPhi12_S | AUUGCUCCUUACGAGGAGACUCUGGGCG | 1632 |
| | GUGCUACAA | |
| R2929_CasPhi12_S | AUUGCUCCUUACGAGGAGACGCAUGCCU | 1633 |
| | GGAGCAGCC | |
| R2930_CasPhi12_S | AUUGCUCCUUACGAGGAGACUAGCACCG | 1634 |
| | CCCAGACGA | |
| R2931_CasPhi12_S | AUUGCUCCUUACGAGGAGACUGGCCGCC | 1635 |
| | AGCCCAGUU | |
| R2932_CasPhi12_S | AUUGCUCCUUACGAGGAGACCUUCCGCU | 1636 |
| | CACCUCCGC | |
| R2933_CasPhi12_S | AUUGCUCCUUACGAGGAGACCAGGGCCU | 1637 |
| | GUCUGGGGA | |
| R2934_CasPhi12_S | AUUGCUCCUUACGAGGAGACUCCCCAGC | 1638 |
| | CCUGCUCGU | |
| R2935_CasPhi12_S | AUUGCUCCUUACGAGGAGACGGUCACCA | 1639 |
| | CGAGCAGGG | |
| R2936_CasPhi12_S | AUUGCUCCUUACGAGGAGACUCCCCUUC | 1640 |
| | GGUCACCAC | |
| R2937_CasPhi12_S | AUUGCUCCUUACGAGGAGACGAGAAGCU | 1641 |
| | GCAGGUGAA | |
| R2938_CasPhi12_S | AUUGCUCCUUACGAGGAGACACCUGCAG | 1642 |
| | CUUCUCCAA | |
| R2939_CasPhi12_S | AUUGCUCCUUACGAGGAGACUCCAACAC | 1643 |
| | AUCGGAGAG | |
| R2940_CasPhi12_S | AUUGCUCCUUACGAGGAGACGCACGAAG | 1644 |
| | CUCUCCGAU | |
| R2941_CasPhi12_S | AUUGCUCCUUACGAGGAGACAGCACGAA | 1645 |
| | GCUCUCCGA | |
| R2942_CasPhi12_S | AUUGCUCCUUACGAGGAGACGUGCUAAA | 1646 |
| | CUGGUACCG | |
| R2943_CasPhi12_S | AUUGCUCCUUACGAGGAGACCUGGGGCU | 1647 |
| | CAUGCGGUA | |
| R2944_CasPhi12_S | AUUGCUCCUUACGAGGAGACUCCGUCUG | 1648 |
| | GUUGCUGGG | |
| R2945_CasPhi12_S | AUUGCUCCUUACGAGGAGACCCCGAGGA | 1649 |
| | CCGCAGCCA | |
| R2946_CasPhi12_S | AUUGCUCCUUACGAGGAGACUGUGACAC | 1650 |
| | GGAAGCGGC | |
| R2947_CasPhi12_S | AUUGCUCCUUACGAGGAGACCGUGUCAC | 1651 |
| | ACAACUGCC | |
| R2948_CasPhi12_S | AUUGCUCCUUACGAGGAGACGGCAGUUG | 1652 |
| | UGUGACACG | |
| R2949_CasPhi12_S | AUUGCUCCUUACGAGGAGACCACAUGAG | 1653 |
| | CGUGGUCAG | |
| R2950_CasPhi12_S | AUUGCUCCUUACGAGGAGACCGCCGGGC | 1654 |
| | CCUGACCAC | |
| R2951_CasPhi12_S | AUUGCUCCUUACGAGGAGACGGGGCCAG | 1655 |
| | GGAGAUGGC | |
| R2952_CasPhi12_S | AUUGCUCCUUACGAGGAGACAUCUGCGC | 1656 |
| | CUUGGGGGC | |
| R2953_CasPhi12_S | AUUGCUCCUUACGAGGAGACGAUCUGCG | 1657 |
| | CCUUGGGGG | |
| R2954_CasPhi12_S | AUUGCUCCUUACGAGGAGACCCAGACAG | 1658 |
| | GCCCUGGAA | |
| R2955_CasPhi12_S | AUUGCUCCUUACGAGGAGACCCAGCCCU | 1659 |
| | GCUCGUGGU | |
| R2956_CasPhi12_S | AUUGCUCCUUACGAGGAGACUCUCUGGA | 1660 |
| | AGGGCACAA | |
| R2957_CasPhi12_S | AUUGCUCCUUACGAGGAGACGUGCCCUU | 1661 |
| | CCAGAGAGA | |
| R2958_CasPhi12_S | AUUGCUCCUUACGAGGAGACUGCCCUUC | 1662 |
| | CAGAGAGAA | |
| R2959_CasPhi12_S | AUUGCUCCUUACGAGGAGACUGCCCUUC | 1663 |
| | UCUCUGGAA | |
| R2960_CasPhi12_S | AUUGCUCCUUACGAGGAGACCAGAGAGA | 1664 |
| | AGGGCAGAA | |
| R2961_CasPhi12_S | AUUGCUCCUUACGAGGAGACGAACUGGC | 1665 |
| | CGGCUGGCC | |
| R2962_CasPhi12_S | AUUGCUCCUUACGAGGAGACGGAACUGG | 1666 |
| | CCGGCUGGC | |
| R2963_CasPhi12_S | AUUGCUCCUUACGAGGAGACCAAACCCU | 1667 |
| | GGUGGUUGG | |
| R2964_CasPhi12_S | AUUGCUCCUUACGAGGAGACGUGUCGUG | 1668 |
| | GGCGGCCUG | |
| R2965_CasPhi12_S | AUUGCUCCUUACGAGGAGACCCUCGUGC | 1669 |
| | GGCCCGGGA | |
| R2966_CasPhi12_S | AUUGCUCCUUACGAGGAGACUCCCUGCA | 1670 |
| | GAGAAACAC | |
| R2967_CasPhi12_S | AUUGCUCCUUACGAGGAGACCUCUGCAG | 1671 |
| | GGACAAUAG | |
| R2968_CasPhi12_S | AUUGCUCCUUACGAGGAGACUCUGCAGG | 1672 |
| | GACAAUAGG | |
| R2969_CasPhi12_S | AUUGCUCCUUACGAGGAGACCUCCUCAA | 1673 |
| | AGAAGGAGG | |
| R2970_CasPhi12_S | AUUGCUCCUUACGAGGAGACUCCUCAAA | 1674 |
| | GAAGGAGGA | |
| R2971_CasPhi12_S | AUUGCUCCUUACGAGGAGACUCUGUGGA | 1675 |
| | CUAUGGGGA | |
| R2972_CasPhi12_S | AUUGCUCCUUACGAGGAGACUCUCGCCA | 1676 |
| | CUGGAAAUC | |
| R2973_CasPhi12_S | AUUGCUCCUUACGAGGAGACCCAGUGGC | 1677 |
| | GAGAGAAGA | |
| R2974_CasPhi12_S | AUUGCUCCUUACGAGGAGACCAGUGGCG | 1678 |
| | AGAGAAGAC | |
| R2975_CasPhi12_S | AUUGCUCCUUACGAGGAGACCGCUAGGA | 1679 |
| | AAGACAAUG | |
| R2976_CasPhi12_S | AUUGCUCCUUACGAGGAGACUCUUUCCU | 1680 |
| | AGCGGAAUG | |
| R2977_CasPhi12_S | AUUGCUCCUUACGAGGAGACCCUAGCGG | 1681 |
| | AAUGGGCAC | |
| R2978_CasPhi12_S | AUUGCUCCUUACGAGGAGACCUAGCGGA | 1682 |
| | AUGGGCACC | |
| R2979_CasPhi12_S | AUUGCUCCUUACGAGGAGACGCCCCUCU | 1683 |
| | GACCGGCUU | |
| R2980_CasPhi12_S | AUUGCUCCUUACGAGGAGACCUUGGCCA | 1684 |
| | CCAGUGUUC | |
| R2981_CasPhi12_S | AUUGCUCCUUACGAGGAGACGCCACCAG | 1685 |
| | UGUUCUGCA | |
| R2982_CasPhi12_S | AUUGCUCCUUACGAGGAGACUGCAGACC | 1686 |
| | CUCCACCAU | |
| R2983_CasPhi12_S | AUUGCUCCUUACGAGGAGACUCCUGAGG | 1687 |
| | AAAUGCGCU | |
| R2984_CasPhi12_S | AUUGCUCCUUACGAGGAGACCCUCAGGA | 1688 |
| | GAAGCAGGC | |
| R2985_CasPhi12_S | AUUGCUCCUUACGAGGAGACCUCAGGAG | 1689 |
| | AAGCAGGCA | |
| R2986_CasPhi12_S | AUUGCUCCUUACGAGGAGACCAGGCCGU | 1690 |
| | CCAGGGGCU | |
| R2987_CasPhi12_S | AUUGCUCCUUACGAGGAGACAGACAUGA | 1691 |
| | GUCCUGUGG | |
| R2988_CasPhi12_S | AUUGCUCCUUACGAGGAGACAGGUCCUG | 1692 |
| | CCAGCACAG | |
| R2989_CasPhi12_S | AUUGCUCCUUACGAGGAGACAGGGAGCU | 1693 |
| | GGACGCAGG | |
| R2990_CasPhi12_S | AUUGCUCCUUACGAGGAGACAGCCCCGG | 1694 |
| | GCCGCAGGC | |
| R2991_CasPhi12_S | AUUGCUCCUUACGAGGAGACAGGCAGGA | 1695 |
| | GGCUCCGGG | |
| R2992_CasPhi12_S | AUUGCUCCUUACGAGGAGACGGGGCUGG | 1696 |
| | UUGGAGAUG | |
| R2993_CasPhi12_S | AUUGCUCCUUACGAGGAGACGAGAUGGC | 1697 |
| | CUUGGAGCA | |
| R2994_CasPhi12_S | AUUGCUCCUUACGAGGAGACGCUGCUCC | 1698 |
| | AAGGCCAUC | |
| R2995_CasPhi12_S | AUUGCUCCUUACGAGGAGACGAGCAGCC | 1699 |
| | AAGGUGCCC | |
| R2996_CasPhi12_S | AUUGCUCCUUACGAGGAGACGGGAUGCC | 1700 |
| | ACUGCCAGG | |
| R2997_CasPhi12_S | AUUGCUCCUUACGAGGAGACCGGGAUGC | 1701 |
| | CACUGCCAG | |
| R2998_CasPhi12_S | AUUGCUCCUUACGAGGAGACGGCCCUGC | 1702 |
| | GUCCAGGGC | |
| R2999_CasPhi12_S | AUUGCUCCUUACGAGGAGACUCUGCUCC | 1703 |
| | CUGCAGGCC | |
| R3000_CasPhi12_S | AUUGCUCCUUACGAGGAGACUCUAGGCC | 1704 |
| | UGCAGGGAG | |
| R3001_CasPhi12_S | AUUGCUCCUUACGAGGAGACCCUGAAAC | 1705 |
| | UUCUCUAGG | |
| R3002_CasPhi12_S | AUUGCUCCUUACGAGGAGACUGACCUUC | 1706 |
| | CCUGAAACU | |
| R3003_CasPhi12_S | AUUGCUCCUUACGAGGAGACCAGGGAAG | 1707 |
| | GUCAGAAGA | |
| R3004_CasPhi12_S | AUUGCUCCUUACGAGGAGACAGGGAAGG | 1708 |
| | UCAGAAGAG | |
| R3005_CasPhi12_S | AUUGCUCCUUACGAGGAGACCUGCCCUG | 1709 |
| | CCCACCACA | |
| R3006_CasPhi12_S | AUUGCUCCUUACGAGGAGACCCUGCCCU | 1710 |
| | GCCCACCAC | |
| R3007_CasPhi12_S | AUUGCUCCUUACGAGGAGACACACAUGC | 1711 |
| | CCAGGCAGC | |
| R3008_CasPhi12_S | AUUGCUCCUUACGAGGAGACCACAUGCC | 1712 |
| | CAGGCAGCA | |
| R3009_CasPhi12_S | AUUGCUCCUUACGAGGAGACCCUGCCCC | 1713 |
| | ACAAAGGGC | |
| R3010_CasPhi12_S | AUUGCUCCUUACGAGGAGACGUGGGGCA | 1714 |
| | GGGAAGCUG | |
| R3011_CasPhi12_S | AUUGCUCCUUACGAGGAGACUGGGGCAG | 1715 |
| | GGAAGCUGA | |
| R3012_CasPhi12_S | AUUGCUCCUUACGAGGAGACCUGCCUCA | 1716 |
| | GCUUCCCUG | |
| R3013_CasPhi12_S | AUUGCUCCUUACGAGGAGACCAGGCCCA | 1717 |
| | GCCAGCACU | |
| R3014_CasPhi12_S | AUUGCUCCUUACGAGGAGACAGGCCCAG | 1718 |
| | CCAGCACUC | |
| R3015_CasPhi12_S | AUUGCUCCUUACGAGGAGACCACCCCAG | 1719 |
| | CCCCUCACA | |
| R3016_CasPhi12_S | AUUGCUCCUUACGAGGAGACGGACCGUA | 1720 |
| | GGAUGUCCC | |

TABLE AB
shortened CasΦ.12 gRNAs targeting human CIITA

| | | SEQ |
|---|---|---|
| | Repeat + spacer | ID |
| Name | RNA Sequence (5′ --> 3′) | NO |
| R4503_CasPhi12_ | AUUGCUCCUUACGAGGAGACCUACACAA | 1721 |
| C2TA_T1.1_S | UGCGUUGCC | |
| R4504_CasPhi12_ | AUUGCUCCUUACGAGGAGACGGGCUCUG | 1722 |
| C2TA_T1.2_S | ACAGGUAGG | |
| R4505_CasPhi12_ | AUUGCUCCUUACGAGGAGACUGUAGGAA | 1723 |
| C2TA_T1.3_S | UCCCAGCCA | |
| R4506_CasPhi12_ | AUUGCUCCUUACGAGGAGACCCUGGCUC | 1724 |
| C2TA_T1.8_S | CACGCCCUG | |
| R4507_CasPhi12_ | AUUGCUCCUUACGAGGAGACGGGAAGCU | 1725 |
| C2TA_T1.9_S | GAGGGCACG | |
| R4508_CasPhi12_ | AUUGCUCCUUACGAGGAGACACAGCGAU | 1726 |
| C2TA_T2.1_S | GCUGACCCC | |
| R4509_CasPhi12_ | AUUGCUCCUUACGAGGAGACUUAACAGC | 1727 |
| C2TA_T2.2_S | GAUGCUGAC | |
| R4510_CasPhi12_ | AUUGCUCCUUACGAGGAGACUAUGACCA | 1728 |
| C2TA_T2.3_S | GAUGGACCU | |
| R4511_CasPhi12_ | AUUGCUCCUUACGAGGAGACGGGCCCCU | 1729 |
| C2TA_T2.4_S | AGAAGGUGG | |
| R4512_CasPhi12_ | AUUGCUCCUUACGAGGAGACUAGGGGCC | 1730 |
| C2TA_T2.5_S | CCAACUCCA | |
| R4513_CasPhi12_ | AUUGCUCCUUACGAGGAGACAGAAGCUC | 1731 |
| C2TA_T2.6_S | CAGGUAGCC | |
| R4514_CasPhi12_ | AUUGCUCCUUACGAGGAGACUCCAGCCA | 1732 |
| C2TA_T2.7_S | GGUCCAUCU | |
| R4515_CasPhi12_ | AUUGCUCCUUACGAGGAGACUUCUCCAG | 1733 |
| C2TA_T2.8_S | CCAGGUCCA | |
| R5200_CasPhi12_S | AUUGCUCCUUACGAGGAGACAGCAGGCU | 2290 |
| | GUUGUGUGA | |
| R5201_CasPhi12_S | AUUGCUCCUUACGAGGAGACCAUGUCAC | 2291 |
| | ACAACAGCC | |
| R5202_CasPhi12_S | AUUGCUCCUUACGAGGAGACUGUGACAU | 2292 |
| | GGAAGGUGA | |
| R5203_CasPhi12_S | AUUGCUCCUUACGAGGAGACAUCACCUU | 2293 |
| | CCAUGUCAC | |
| R5204_CasPhi12_S | AUUGCUCCUUACGAGGAGACGCAUAAGC | 2294 |
| | CUCCCUGGU | |
| R5205_CasPhi12_S | AUUGCUCCUUACGAGGAGACCAGGACUC | 2295 |
| | CCAGCUGGA | |
| R5206_CasPhi12_S | AUUGCUCCUUACGAGGAGACCUCAGGCC | 2296 |
| | CUCCAGCUG | |
| R5207_CasPhi12_S | AUUGCUCCUUACGAGGAGACUGCUGGCA | 2297 |
| | UCUCCAUAC | |
| R5208_CasPhi12_S | AUUGCUCCUUACGAGGAGACUGCCCAAC | 2298 |
| | UUCUGCUGG | |
| R5209_CasPhi12_S | AUUGCUCCUUACGAGGAGACCUGCCCAA | 2299 |
| | CUUCUGCUG | |
| R5210_CasPhi12_S | AUUGCUCCUUACGAGGAGACUCUGCCCA | 2300 |
| | ACUUCUGCU | |
| R5211_CasPhi12_S | AUUGCUCCUUACGAGGAGACUGACUUUU | 2301 |
| | CUGCCCAAC | |
| R5212_CasPhi12_S | AUUGCUCCUUACGAGGAGACCUGACUUU | 2302 |
| | UCUGCCCAA | |
| R5213_CasPhi12_S | AUUGCUCCUUACGAGGAGACUCUGACUU | 2303 |
| | UUCUGCCCA | |
| R5214_CasPhi12_S | AUUGCUCCUUACGAGGAGACCCAGAGGA | 2304 |
| | GCUUCCGGC | |
| R5215_CasPhi12_S | AUUGCUCCUUACGAGGAGACAGGUCUGC | 2305 |
| | CGGAAGCUC | |
| R5216_CasPhi12_S | AUUGCUCCUUACGAGGAGACCGGCAGAC | 2306 |
| | CUGAAGCAC | |
| R5217_CasPhi12_S | AUUGCUCCUUACGAGGAGACCAGUGCUU | 2307 |
| | CAGGUCUGC | |
| R5218_CasPhi12_S | AUUGCUCCUUACGAGGAGACAACAGCGC | 2308 |
| | AGGCAGUGG | |
| R5219_CasPhi12_S | AUUGCUCCUUACGAGGAGACAACCAGGA | 2309 |
| | GCCAGCCUC | |
| R5220_CasPhi12_S | AUUGCUCCUUACGAGGAGACUCCAGGCG | 2310 |
| | CAUCUGGCC | |
| R5221_CasPhi12_S | AUUGCUCCUUACGAGGAGACCUCCAGGC | 2311 |
| | GCAUCUGGC | |
| R5222_CasPhi12_S | AUUGCUCCUUACGAGGAGACUCUCCAGG | 2312 |
| | CGCAUCUGG | |
| R5223_CasPhi12_S | AUUGCUCCUUACGAGGAGACCUCCAGUU | 2313 |
| | CCUCGUUGA | |
| R5224_CasPhi12_S | AUUGCUCCUUACGAGGAGACUCCAGUUC | 2314 |
| | CUCGUUGAG | |
| R5225_CasPhi12_S | AUUGCUCCUUACGAGGAGACAGGCAGCU | 2315 |
| | CAACGAGGA | |
| R5226_CasPhi12_S | AUUGCUCCUUACGAGGAGACCUCGUUGA | 2316 |
| | GCUGCCUGA | |
| R5227_CasPhi12_S | AUUGCUCCUUACGAGGAGACAGCUGCCU | 2317 |
| | GAAUCUCCC | |
| R5228_CasPhi12_S | AUUGCUCCUUACGAGGAGACGUCCCCAC | 2318 |
| | CAUCUCCAC | |
| R5229_CasPhi12_S | AUUGCUCCUUACGAGGAGACUCCCCACC | 2319 |
| | AUCUCCACU | |
| R5230_CasPhi12_S | AUUGCUCCUUACGAGGAGACCCAGAGCC | 2320 |
| | CAUGGGGCA | |
| R5231_CasPhi12_S | AUUGCUCCUUACGAGGAGACGCCAGAGC | 2321 |
| | CCAUGGGGC | |
| R5232_CasPhi12_S | AUUGCUCCUUACGAGGAGACCAGCCUCA | 2322 |
| | GAGAUUUGC | |
| R5233_CasPhi12_S | AUUGCUCCUUACGAGGAGACGGAGGCCG | 2323 |
| | UGGACAGUG | |
| R5234_CasPhi12_S | AUUGCUCCUUACGAGGAGACACUGUCCA | 2324 |
| | CGGCCUCCC | |
| R5235_CasPhi12_S | AUUGCUCCUUACGAGGAGACGCUCCAUC | 2325 |
| | AGCCACUGA | |
| R5236_CasPhi12_S | AUUGCUCCUUACGAGGAGACAGGCAUGC | 2326 |
| | UGGGCAGGU | |
| R5237_CasPhi12_S | AUUGCUCCUUACGAGGAGACCUCGGGAG | 2327 |
| | GUCAGGGCA | |
| R5238_CasPhi12_S | AUUGCUCCUUACGAGGAGACGCUCGGGA | 2328 |
| | GGUCAGGGC | |
| R5239_CasPhi12_S | AUUGCUCCUUACGAGGAGACGAGACCUC | 2329 |
| | UCCAGCUGC | |
| R5240_CasPhi12_S | AUUGCUCCUUACGAGGAGACUUGGAGAC | 2330 |
| | CUCUCCAGC | |
| R5241_CasPhi12_S | AUUGCUCCUUACGAGGAGACGAAGCUUG | 2331 |
| | UUGGAGACC | |
| R5242_CasPhi12_S | AUUGCUCCUUACGAGGAGACGGAAGCUU | 2332 |
| | GUUGGAGAC | |
| R5243_CasPhi12_S | AUUGCUCCUUACGAGGAGACUGGAAGCU | 2333 |
| | UGUUGGAGA | |
| R5244_CasPhi12_S | AUUGCUCCUUACGAGGAGACUACCGCUC | 2334 |
| | ACUGCAGGA | |
| R5245_CasPhi12_S | AUUGCUCCUUACGAGGAGACCUGCUGCU | 2335 |
| | CCUCUCCAG | |
| R5246_CasPhi12_S | AUUGCUCCUUACGAGGAGACCCGCUCCA | 2336 |
| | GGCUCUUGC | |
| R5247_CasPhi12_S | AUUGCUCCUUACGAGGAGACUGCCCAGU | 2337 |
| | CCGGGGUGG | |
| R5248_CasPhi12_S | AUUGCUCCUUACGAGGAGACGGCCAGCU | 2338 |
| | GCCGUUCUG | |
| R5249_CasPhi12_S | AUUGCUCCUUACGAGGAGACGCAGCCAA | 2339 |
| | CAGCACCUC | |
| R5250_CasPhi12_S | AUUGCUCCUUACGAGGAGACGCUGCCAA | 2340 |
| | GGAGCACCG | |
| R5251_CasPhi12_S | AUUGCUCCUUACGAGGAGACCCCAGCAC | 2341 |
| | AGCAAUCAC | |
| R5252_CasPhi12_S | AUUGCUCCUUACGAGGAGACGCCCAGCA | 2342 |
| | CAGCAAUCA | |
| R5253_CasPhi12_S | AUUGCUCCUUACGAGGAGACCUGUGCUG | 2343 |
| | GGCAAAGCU | |
| R5254_CasPhi12_S | AUUGCUCCUUACGAGGAGACCCCUGACC | 2344 |
| | AGCUUUGCC | |
| R5255_CasPhi12_S | AUUGCUCCUUACGAGGAGACGGCUGGGG | 2345 |
| | CAGUGAGCC | |
| R5256_CasPhi12_S | AUUGCUCCUUACGAGGAGACUGGCCGGC | 2346 |
| | UUCCCCAGU | |
| R5257_CasPhi12_S | AUUGCUCCUUACGAGGAGACCCCAGUAC | 2347 |
| | GACUUUGUC | |
| R5258_CasPhi12_S | AUUGCUCCUUACGAGGAGACGUCUUCUC | 2348 |
| | UGUCCCCUG | |
| R5259_CasPhi12_S | AUUGCUCCUUACGAGGAGACUCUUCUCU | 2349 |
| | GUCCCCUGC | |
| R5260_CasPhi12_S | AUUGCUCCUUACGAGGAGACUCUGUCCC | 2350 |
| | CUGCCAUUG | |
| R5261_CasPhi12_S | AUUGCUCCUUACGAGGAGACAAGCAAUG | 2351 |
| | GCAGGGGAC | |
| R5262_CasPhi12_S | AUUGCUCCUUACGAGGAGACCUUGAACC | 2352 |
| | GUCCGGGGG | |
| R5263_CasPhi12_S | AUUGCUCCUUACGAGGAGACAACCGUCC | 2353 |
| | GGGGGAUGC | |
| R5264_CasPhi12_S | AUUGCUCCUUACGAGGAGACUCCCUGGG | 2354 |
| | CCCACAGCC | |
| R5265_CasPhi12_S | AUUGCUCCUUACGAGGAGACAAGAUGUG | 2355 |
| | GCUGAAAAC | |
| R5266_CasPhi12_S | AUUGCUCCUUACGAGGAGACUCAGCCAC | 2356 |
| | AUCUUGAAG | |
| R5267_CasPhi12_S | AUUGCUCCUUACGAGGAGACCAGCCACA | 2357 |
| | UCUUGAAGA | |
| R5268_CasPhi12_S | AUUGCUCCUUACGAGGAGACAGCCACAU | 2358 |
| | CUUGAAGAG | |
| R5269_CasPhi12_S | AUUGCUCCUUACGAGGAGACAAGAGACC | 2359 |
| | UGACCGCGU | |
| R5270_CasPhi12_S | AUUGCUCCUUACGAGGAGACUGCUCAUC | 2360 |
| | CUAGACGGC | |
| R5271_CasPhi12_S | AUUGCUCCUUACGAGGAGACCAGCUCCU | 2361 |
| | CGAAGCCGU | |
| R5272_CasPhi12_S | AUUGCUCCUUACGAGGAGACCGCUUCCA | 2362 |
| | GCUCCUCGA | |
| R5273_CasPhi12_S | AUUGCUCCUUACGAGGAGACGAGGAGCU | 2363 |
| | GGAAGCGCA | |
| R5274_CasPhi12_S | AUUGCUCCUUACGAGGAGACCUGCACAG | 2364 |
| | CACGUGCGG | |
| R5275_CasPhi12_S | AUUGCUCCUUACGAGGAGACUGGAAAAG | 2365 |
| | GCCGGCCAG | |
| R5276_CasPhi12_S | AUUGCUCCUUACGAGGAGACUUCUGGAA | 2366 |
| | AAGGCCGGC | |
| R5277_CasPhi12_S | AUUGCUCCUUACGAGGAGACUCCAGAAG | 2367 |
| | AAGCUGCUC | |
| R5278_CasPhi12_S | AUUGCUCCUUACGAGGAGACCCAGAAGA | 2368 |
| | AGCUGCUCC | |
| R5279_CasPhi12_S | AUUGCUCCUUACGAGGAGACCAGAAGAA | 2369 |
| | GCUGCUCCG | |
| R5280_CasPhi12_S | AUUGCUCCUUACGAGGAGACCACCCUCC | 2370 |
| | UCCUCACAG | |
| R5281_CasPhi12_S | AUUGCUCCUUACGAGGAGACCUCAGGCU | 2371 |
| | CUGGACCAG | |
| R5282_CasPhi12_S | AUUGCUCCUUACGAGGAGACGAGCUGUC | 2372 |
| | CGGCUUCUC | |
| R5283_CasPhi12_S | AUUGCUCCUUACGAGGAGACAGCUGUCC | 2373 |
| | GGCUUCUCC | |
| R5284_CasPhi12_S | AUUGCUCCUUACGAGGAGACUCCAUGGA | 2374 |
| | GCAGGCCCA | |
| R5285_CasPhi12_S | AUUGCUCCUUACGAGGAGACGAGAGCUC | 2375 |
| | AGGGAUGAC | |
| R5286_CasPhi12_S | AUUGCUCCUUACGAGGAGACAGAGCUCA | 2376 |
| | GGGAUGACA | |
| R5287_CasPhi12_S | AUUGCUCCUUACGAGGAGACGUGCUCUG | 2377 |
| | UCAUCCCUG | |
| R5288_CasPhi12_S | AUUGCUCCUUACGAGGAGACUUCUCAGU | 2378 |
| | CACAGCCAC | |
| R5289_CasPhi12_S | AUUGCUCCUUACGAGGAGACUCAGUCAC | 2379 |
| | AGCCACAGC | |
| R5290_CasPhi12_S | AUUGCUCCUUACGAGGAGACGUGCCGGG | 2380 |
| | CAGUGUGCC | |
| R5291_CasPhi12_S | AUUGCUCCUUACGAGGAGACUGCCGGGC | 2381 |
| | AGUGUGCCA | |
| R5292_CasPhi12_S | AUUGCUCCUUACGAGGAGACGCGUCCUC | 2382 |
| | CCCAAGCUC | |
| R5293_CasPhi12_S | AUUGCUCCUUACGAGGAGACGGGAGGAC | 2383 |
| | GCCAAGCUG | |
| R5294_CasPhi12_S | AUUGCUCCUUACGAGGAGACGCCAGCUC | 2384 |
| | UGCCAGGGC | |
| R5295_CasPhi12_S | AUUGCUCCUUACGAGGAGACAUGUCUGC | 2385 |
| | GGCCCAGCU | |
| R5392_CasPhi12_S | AUUGCUCCUUACGAGGAGACGAUGUCUG | 2386 |
| | CGGCCCAGC | |
| R5393_CasPhi12_S | AUUGCUCCUUACGAGGAGACCCAUCCGC | 2387 |
| | AGACGUGAG | |
| R5394_CasPhi12_S | AUUGCUCCUUACGAGGAGACGCCAUCGC | 2388 |
| | CCAGGUCCU | |
| R5395_CasPhi12_S | AUUGCUCCUUACGAGGAGACGGCCAUCG | 2389 |
| | CCCAGGUCC | |
| R5396_CasPhi12_S | AUUGCUCCUUACGAGGAGACGACUAAGC | 2390 |
| | CUUUGGCCA | |
| R5397_CasPhi12_S | AUUGCUCCUUACGAGGAGACGUCCAACA | 2391 |
| | CCCACCGCG | |
| R5398_CasPhi12_S | AUUGCUCCUUACGAGGAGACCAGGAGGA | 2392 |
| | AGCUGGGGA | |
| R5399_CasPhi12_S | AUUGCUCCUUACGAGGAGACCCCAGCUU | 2393 |
| | CCUCCUGCA | |
| R5400_CasPhi12_S | AUUGCUCCUUACGAGGAGACCUCCUGCA | 2394 |
| | AUGCUUCCU | |
| R5401_CasPhi12_S | AUUGCUCCUUACGAGGAGACCUGGGGGC | 2395 |
| | CCUGUGGCU | |
| R5402_CasPhi12_S | AUUGCUCCUUACGAGGAGACGCCACUCA | 2396 |
| | GAGCCAGCC | |
| R5403_CasPhi12_S | AUUGCUCCUUACGAGGAGACCGCCACUC | 2397 |
| | AGAGCCAGC | |
| R5404_CasPhi12_S | AUUGCUCCUUACGAGGAGACAUUUCGCC | 2398 |
| | ACUCAGAGC | |
| R5405_CasPhi12_S | AUUGCUCCUUACGAGGAGACUCCUUGAU | 2399 |
| | UUCGCCACU | |
| R5406_CasPhi12_S | AUUGCUCCUUACGAGGAGACGGGUCAAU | 2400 |
| | GCUAGGUAC | |
| R5407_CasPhi12_S | AUUGCUCCUUACGAGGAGACCUUGGGGU | 2401 |
| | CAAUGCUAG | |
| R5408_CasPhi12_S | AUUGCUCCUUACGAGGAGACUUCCUUGG | 2402 |
| | GGUCAAUGC | |
| R5409_CasPhi12_S | AUUGCUCCUUACGAGGAGACACCCCAAG | 2403 |
| | GAAGAAGAG | |
| R5410_CasPhi12_S | AUUGCUCCUUACGAGGAGACUCAUAGGG | 2404 |
| | CCUCUUCUU | |
| R5411_CasPhi12_S | AUUGCUCCUUACGAGGAGACCUGGCUGG | 2405 |
| | GCUGAUCUU | |
| R5412_CasPhi12_S | AUUGCUCCUUACGAGGAGACUGGCUGGG | 2406 |
| | CUGAUCUUC | |
| R5413_CasPhi12_S | AUUGCUCCUUACGAGGAGACCAGCCUCC | 2407 |
| | CGCCCGCUG | |
| R5414_CasPhi12_S | AUUGCUCCUUACGAGGAGACCUGUCCAC | 2408 |
| | CGAGGCAGC | |
| R5415_CasPhi12_S | AUUGCUCCUUACGAGGAGACUGCUUCCU | 2409 |
| | GUCCACCGA | |
| R5416_CasPhi12_S | AUUGCUCCUUACGAGGAGACAGGUACCU | 2410 |
| | CGCAAGCAC | |
| R5417_CasPhi12_S | AUUGCUCCUUACGAGGAGACCGAGGUAC | 2411 |
| | CUGAAGCGG | |
| R5418_CasPhi12_S | AUUGCUCCUUACGAGGAGACCAGCCUCC | 2412 |
| | UCGGCCUCG | |
| R5419_CasPhi12_S | AUUGCUCCUUACGAGGAGACGGCAGCAC | 2413 |
| | GUGGUACAG | |
| R5420_CasPhi12_S | AUUGCUCCUUACGAGGAGACGCAGCACG | 2414 |
| | UGGUACAGG | |
| R5421_CasPhi12_S | AUUGCUCCUUACGAGGAGACUCUGGGCA | 2415 |
| | CCCGCCUCA | |
| R5422_CasPhi12_S | AUUGCUCCUUACGAGGAGACCUGGGCAC | 2416 |
| | CCGCCUCAC | |
| R5423_CasPhi12_S | AUUGCUCCUUACGAGGAGACUGGGCACC | 2417 |
| | CGCCUCACG | |
| R5424_CasPhi12_S | AUUGCUCCUUACGAGGAGACCCCAGUAC | 2418 |
| | AUGUGCAUC | |
| R5425_CasPhi12_S | AUUGCUCCUUACGAGGAGACGCCCGCCG | 2419 |
| | CCUCCAAGG | |
| R5426_CasPhi12_S | AUUGCUCCUUACGAGGAGACGAGGCGGC | 2420 |
| | GGGCCAAGA | |
| R5427_CasPhi12_S | AUUGCUCCUUACGAGGAGACUCCCUGGA | 2421 |
| | CCUCCGCAG | |
| R5428_CasPhi12_S | AUUGCUCCUUACGAGGAGACGCCCCUCU | 2422 |
| | GGAUUGGGG | |
| R5429_CasPhi12_S | AUUGCUCCUUACGAGGAGACCCCCUCUG | 2423 |
| | GAUUGGGGA | |
| R5430_CasPhi12_S | AUUGCUCCUUACGAGGAGACGGGAGCCU | 2424 |
| | CGUGGGACU | |
| R5431_CasPhi12_S | AUUGCUCCUUACGAGGAGACGUCUCCCC | 2425 |
| | AUGCUGCUG | |
| R5432_CasPhi12_S | AUUGCUCCUUACGAGGAGACUCCUCUGC | 2426 |
| | UGCCUGAAG | |
| R5433_CasPhi12_S | AUUGCUCCUUACGAGGAGACAGGCAGCA | 2427 |
| | GAGGAGAAG | |
| R5434_CasPhi12_S | AUUGCUCCUUACGAGGAGACAAAGGCUC | 2428 |
| | GAUGGUGAA | |
| R5435_CasPhi12_S | AUUGCUCCUUACGAGGAGACGAAAGGCU | 2429 |
| | CGAUGGUGA | |
| R5436_CasPhi12_S | AUUGCUCCUUACGAGGAGACACCAUCGA | 2430 |
| | GCCUUUCAA | |
| R5437_CasPhi12_S | AUUGCUCCUUACGAGGAGACGCUUUGAA | 2431 |
| | AGGCUCGAU | |
| R5438_CasPhi12_S | AUUGCUCCUUACGAGGAGACAGGGACUU | 2432 |
| | GGCUUUGAA | |
| R5439_CasPhi12_S | AUUGCUCCUUACGAGGAGACCAAAGCCA | 2433 |
| | AGUCCCUGA | |
| R5440_CasPhi12_S | AUUGCUCCUUACGAGGAGACAAAGCCAA | 2434 |
| | GUCCCUGAA | |
| R5441_CasPhi12_S | AUUGCUCCUUACGAGGAGACCACAUCCU | 2435 |
| | UCAGGGACU | |
| R5442_CasPhi12_S | AUUGCUCCUUACGAGGAGACCCAGGUCU | 2436 |
| | UCCACAUCC | |
| R5443_CasPhi12_S | AUUGCUCCUUACGAGGAGACCCCAGGUC | 2437 |
| | UUCCACAUC | |
| R5444_CasPhi12_S | AUUGCUCCUUACGAGGAGACCUCGGAAG | 2438 |
| | ACACAGCUG | |
| R5445_CasPhi12_S | AUUGCUCCUUACGAGGAGACGGUCCCGA | 2439 |
| | ACAGCAGGG | |
| R5446_CasPhi12_S | AUUGCUCCUUACGAGGAGACAGGUCCCG | 2440 |
| | AACAGCAGG | |
| R5447_CasPhi12_S | AUUGCUCCUUACGAGGAGACUUUAGGUC | 2441 |
| | CCGAACAGC | |
| R5448_CasPhi12_S | AUUGCUCCUUACGAGGAGACCUUUAGGU | 2442 |
| | CCCGAACAG | |
| R5449_CasPhi12_S | AUUGCUCCUUACGAGGAGACGGGACCUA | 2443 |
| | AAGAAACUG | |
| R5450_CasPhi12_S | AUUGCUCCUUACGAGGAGACGGGAAAGC | 2444 |
| | CUGGGGGCC | |
| R5451_CasPhi12_S | AUUGCUCCUUACGAGGAGACGGGGAAAG | 2445 |
| | CCUGGGGGC | |
| R5452_CasPhi12_S | AUUGCUCCUUACGAGGAGACCCCCAAAC | 2446 |
| | UGGUGCGGA | |
| R5453_CasPhi12_S | AUUGCUCCUUACGAGGAGACCCCAAACU | 2447 |
| | GGUGCGGAU | |
| R5454_CasPhi12_S | AUUGCUCCUUACGAGGAGACUUCUCACU | 2448 |
| | CAGCGCAUC | |
| R5455_CasPhi12_S | AUUGCUCCUUACGAGGAGACAGCUGGGG | 2449 |
| | GAAGGUGGC | |
| R5456_CasPhi12_S | AUUGCUCCUUACGAGGAGACCCCCAGCU | 2450 |
| | GAAGUCCUU | |
| R5457_CasPhi12_S | AUUGCUCCUUACGAGGAGACCAAGGACU | 2451 |
| | UCAGCUGGG | |
| R5458_CasPhi12_S | AUUGCUCCUUACGAGGAGACCCAAGGAC | 2452 |
| | UUCAGCUGG | |
| R5459_CasPhi12_S | AUUGCUCCUUACGAGGAGACAGGGUUUC | 2453 |
| | CAAGGACUU | |
| R5460_CasPhi12_S | AUUGCUCCUUACGAGGAGACUAGGCACC | 2454 |
| | CAGGUCAGU | |
| R5461_CasPhi12_S | AUUGCUCCUUACGAGGAGACGUAGGCAC | 2455 |
| | CCAGGUCAG | |
| R5462_CasPhi12_S | AUUGCUCCUUACGAGGAGACGCUCGCUG | 2456 |
| | CAUCCCUGC | |
| R5463_CasPhi12_S | AUUGCUCCUUACGAGGAGACGCCUGAGC | 2457 |
| | AGGGAUGCA | |
| R5464_CasPhi12_S | AUUGCUCCUUACGAGGAGACUACAAUAA | 2458 |
| | CUGCAUCUG | |
| R5465_CasPhi12_S | AUUGCUCCUUACGAGGAGACGCUCGUGU | 2459 |
| | GCUUCCGGA | |
| R5466_CasPhi12_S | AUUGCUCCUUACGAGGAGACCGGACAUG | 2460 |
| | GUGUCCCUC | |
| R5467_CasPhi12_S | AUUGCUCCUUACGAGGAGACACGGCUGC | 2461 |
| | CGGGGCCCA | |
| R5468_CasPhi12_S | AUUGCUCCUUACGAGGAGACGGAGGUGU | 2462 |
| | CCUCAUGUG | |
| R5469_CasPhi12_S | AUUGCUCCUUACGAGGAGACCUGGACAC | 2463 |
| | UGAAUGGGA | |
| R5470_CasPhi12_S | AUUGCUCCUUACGAGGAGACAGUGUCCA | 2464 |
| | GGAACACCU | |
| R5471_CasPhi12_S | AUUGCUCCUUACGAGGAGACCAGGUGUU | 2465 |
| | CCUGGACAC | |
| R5472_CasPhi12_S | AUUGCUCCUUACGAGGAGACUUGCAGGU | 2466 |
| | GUUCCUGGA | |
| R5473_CasPhi12_S | AUUGCUCCUUACGAGGAGACACGGAUCA | 2467 |
| | GCCUGAGAU | |

TABLE AC
CasΦ.12 gRNAs targeting mouse PCSK9

| | Repeat + spacer | SEQ |
|---|---|---|
| Name | RNA Sequence (5′ --> 3′) | ID NO |
| R4238_CasPhi12_S | AUUGCUCCUUACGAGGAGACCCGCUGUUGCCG | 1734 |
| | CCGCU | |
| R4239_CasPhi12_S | AUUGCUCCUUACGAGGAGACCCGCCGCUGCUG | 1735 |
| | CUGCU | |
| R4240_CasPhi12_S | AUUGCUCCUUACGAGGAGACCUGCUACUGUGC | 1736 |
| | CCCAC | |
| R4241_CasPhi12_S | AUUGCUCCUUACGAGGAGACAUAAUCUCCAUC | 1737 |
| | CUCGU | |
| R4242_CasPhi12_S | AUUGCUCCUUACGAGGAGACUGAAGAGCUGAU | 1738 |
| | GCUCG | |
| R4243_CasPhi12_S | AUUGCUCCUUACGAGGAGACGAGCAACGGCGG | 1739 |
| | AAGGU | |
| R4244_CasPhi12_S | AUUGCUCCUUACGAGGAGACCUGGCAGCCUCC | 1740 |
| | AGGCC | |
| R4245_CasPhi12_S | AUUGCUCCUUACGAGGAGACUGGUGCUGAUGG | 1741 |
| | AGGAG | |
| R4246_CasPhi12_S | AUUGCUCCUUACGAGGAGACAAUCUGUAGCCU | 1742 |
| | CUGGG | |
| R4247_CasPhi12_S | AUUGCUCCUUACGAGGAGACUUCAAUCUGUAG | 1743 |
| | CCUCU | |
| R4248_CasPhi12_S | AUUGCUCCUUACGAGGAGACGUUCAAUCUGUA | 1744 |
| | GCCUC | |
| R4249_CasPhi12_S | AUUGCUCCUUACGAGGAGACAACAAACUGCCC | 1745 |
| | ACCGC | |
| R4250_CasPhi12_S | AUUGCUCCUUACGAGGAGACAUGACAUAGCCC | 1746 |
| | CGGCG | |
| R4251_CasPhi12_S | AUUGCUCCUUACGAGGAGACUACAUAUCUUUU | 1747 |
| | AUGAC | |
| R4252_CasPhi12_S | AUUGCUCCUUACGAGGAGACUAUGACCUCUUC | 1748 |
| | CCUGG | |
| R4253_CasPhi12_S | AUUGCUCCUUACGAGGAGACAUGACCUCUUCC | 1749 |
| | CUGGC | |
| R4254_CasPhi12_S | AUUGCUCCUUACGAGGAGACUGACCUCUUCCC | 1750 |
| | UGGCU | |
| R4255_CasPhi12_S | AUUGCUCCUUACGAGGAGACACCAAGAAGCCA | 1751 |
| | GGGAA | |
| R4256_CasPhi12_S | AUUGCUCCUUACGAGGAGACCCUGGCUUCUUG | 1752 |
| | GUGAA | |
| R4257_CasPhi12_S | AUUGCUCCUUACGAGGAGACUUGGUGAAGAUG | 1753 |
| | AGCAG | |
| R4258_CasPhi12_S | AUUGCUCCUUACGAGGAGACGUGAAGAUGAGC | 1754 |
| | AGUGA | |
| R4259_CasPhi12_S | AUUGCUCCUUACGAGGAGACCCCCAUGUGGAG | 1755 |
| | UACAU | |
| R4260_CasPhi12_S | AUUGCUCCUUACGAGGAGACCUCAAUGUACUC | 1756 |
| | CACAU | |
| R4261_CasPhi12_S | AUUGCUCCUUACGAGGAGACAGGAAGACUCCU | 1757 |
| | UUGUC | |
| R4262_CasPhi12_S | AUUGCUCCUUACGAGGAGACGUCUUCGCCCAG | 1758 |
| | AGCAU | |
| R4263_CasPhi12_S | AUUGCUCCUUACGAGGAGACUCUUCGCCCAGA | 1759 |
| | GCAUC | |
| R4264_CasPhi12_S | AUUGCUCCUUACGAGGAGACGCCCAGAGCAUC | 1760 |
| | CCAUG | |
| R4265_CasPhi12_S | AUUGCUCCUUACGAGGAGACCAUGGGAUGCUC | 1761 |
| | UGGGC | |
| R4266_CasPhi12_S | AUUGCUCCUUACGAGGAGACGCUCCAGGUUCC | 1762 |
| | AUGGG | |
| R4267_CasPhi12_S | AUUGCUCCUUACGAGGAGACUCCCAGCAUGGC | 1763 |
| | ACCAG | |
| R4268_CasPhi12_S | AUUGCUCCUUACGAGGAGACCUCUGUCUGGUG | 1764 |
| | CCAUG | |
| R4269_CasPhi12_S | AUUGCUCCUUACGAGGAGACGAUACCAGCAUC | 1765 |
| | CAGGG | |
| R4270_CasPhi12_S | AUUGCUCCUUACGAGGAGACAGGGCAGGGUCA | 1766 |
| | CCAUC | |
| R4271_CasPhi12_S | AUUGCUCCUUACGAGGAGACAAGUCGGUGAUG | 1767 |
| | GUGAC | |
| R4272_CasPhi12_S | AUUGCUCCUUACGAGGAGACAACAGCGUGCCG | 1768 |
| | GAGGA | |
| R4273_CasPhi12_S | AUUGCUCCUUACGAGGAGACGCCACACCAGCA | 1769 |
| | UCCCG | |
| R4274_CasPhi12_S | AUUGCUCCUUACGAGGAGACAGCACACGCAGG | 1770 |
| | CUGUG | |
| R4275_CasPhi12_S | AUUGCUCCUUACGAGGAGACACAGUUGAGCAC | 1771 |
| | ACGCA | |
| R4276_CasPhi12_S | AUUGCUCCUUACGAGGAGACCCUUGACAGUUG | 1772 |
| | AGCAC | |
| R4277_CasPhi12_S | AUUGCUCCUUACGAGGAGACGCUGACUCUUCC | 1773 |
| | GAAUA | |
| R4278_CasPhi12_S | AUUGCUCCUUACGAGGAGACAUUCGGAAGAGU | 1774 |
| | CAGCU | |
| R4279_CasPhi12_S | AUUGCUCCUUACGAGGAGACUUCGGAAGAGUC | 1775 |
| | AGCUA | |
| R4280_CasPhi12_S | AUUGCUCCUUACGAGGAGACGGAAGAGUCAGC | 1776 |
| | UAAUC | |
| R4281_CasPhi12_S | AUUGCUCCUUACGAGGAGACUGCUGCCCCUGG | 1777 |
| | CCGGU | |
| R4282_CasPhi12_S | AUUGCUCCUUACGAGGAGACAGGAUGCGGCUA | 1778 |
| | UACCC | |
| R4283_CasPhi12_S | AUUGCUCCUUACGAGGAGACCCAGCUGCUGCA | 1779 |
| | ACCAG | |
| R4284_CasPhi12_S | AUUGCUCCUUACGAGGAGACCAGCAGCUGGGA | 1780 |
| | ACUUC | |
| R4285_CasPhi12_S | AUUGCUCCUUACGAGGAGACCGGGACGACGCC | 1781 |
| | UGCCU | |
| R4286_CasPhi12_S | AUUGCUCCUUACGAGGAGACGUGGCCCCGACU | 1782 |
| | GUGAU | |
| R4287_CasPhi12_S | AUUGCUCCUUACGAGGAGACCCUUGGGGACUU | 1783 |
| | UGGGG | |
| R4288_CasPhi12_S | AUUGCUCCUUACGAGGAGACGUCCCCAAAGUC | 1784 |
| | CCCAA | |
| R4289_CasPhi12_S | AUUGCUCCUUACGAGGAGACGGGACUUUGGGG | 1785 |
| | ACUAA | |
| R4290_CasPhi12_S | AUUGCUCCUUACGAGGAGACGGGGACUAAUUU | 1786 |
| | UGGAC | |
| R4291_CasPhi12_S | AUUGCUCCUUACGAGGAGACGGGACUAAUUUU | 1787 |
| | GGACG | |
| R4292_CasPhi12_S | AUUGCUCCUUACGAGGAGACUGGACGCUGUGU | 1788 |
| | GGAUC | |
| R4293_CasPhi12_S | AUUGCUCCUUACGAGGAGACGGACGCUGUGUG | 1789 |
| | GAUCU | |
| R4294_CasPhi12_S | AUUGCUCCUUACGAGGAGACGACGCUGUGUGG | 1790 |
| | AUCUC | |
| R4295_CasPhi12_S | AUUGCUCCUUACGAGGAGACCCGGGGGCAAAG | 1791 |
| | AGAUC | |
| R4296_CasPhi12_S | AUUGCUCCUUACGAGGAGACGCCCCCGGGAAG | 1792 |
| | GACAU | |
| R4297_CasPhi12_S | AUUGCUCCUUACGAGGAGACCCCCCGGGAAGG | 1793 |
| | ACAUC | |
| R4298_CasPhi12_S | AUUGCUCCUUACGAGGAGACAUGUCACAGAGU | 1794 |
| | GGGAC | |
| R4299_CasPhi12_S | AUUGCUCCUUACGAGGAGACUGGCUCGGAUGC | 1795 |
| | UGAGC | |
| R4300_CasPhi12_S | AUUGCUCCUUACGAGGAGACCCCUGGCCGAGC | 1796 |
| | UGCGG | |
| R4301_CasPhi12_S | AUUGCUCCUUACGAGGAGACGUAGAGAAGUGG | 1797 |
| | AUCAG | |
| R4302_CasPhi12_S | AUUGCUCCUUACGAGGAGACGGUAGAGAAGUG | 1798 |
| | GAUCA | |
| R4303_CasPhi12_S | AUUGCUCCUUACGAGGAGACUCUACCAAAGAC | 1799 |
| | GUCAU | |
| R4304_CasPhi12_S | AUUGCUCCUUACGAGGAGACAUGACGUCUUUG | 1800 |
| | GUAGA | |
| R4305_CasPhi12_S | AUUGCUCCUUACGAGGAGACCCUGAGGACCAG | 1801 |
| | CAGGU | |
| R4306_CasPhi12_S | AUUGCUCCUUACGAGGAGACGGGGUCAGCACC | 1802 |
| | UGCUG | |
| R4307_CasPhi12_S | AUUGCUCCUUACGAGGAGACGAGUGGGCCCCG | 1803 |
| | AGUGU | |
| R4308_CasPhi12_S | AUUGCUCCUUACGAGGAGACUGGGGCACAGCG | 1804 |
| | GGCUG | |
| R4309_CasPhi12_S | AUUGCUCCUUACGAGGAGACUCCAGGAGCGGG | 1805 |
| | AGGCG | |
| R4310_CasPhi12_S | AUUGCUCCUUACGAGGAGACCAGACCUGCUGG | 1806 |
| | CCUCC | |
| R4311_CasPhi12_S | AUUGCUCCUUACGAGGAGACAGGGCCUUGCAG | 1807 |
| | ACCUG | |
| R4312_CasPhi12_S | AUUGCUCCUUACGAGGAGACGGGGGUGAGGGU | 1808 |
| | GUCUA | |
| R4313_CasPhi12_S | AUUGCUCCUUACGAGGAGACGGGGUGAGGGUG | 1809 |
| | UCUAU | |
| R4314_CasPhi12_S | AUUGCUCCUUACGAGGAGACGCACGGGGAACC | 1810 |
| | AGGCA | |
| R4315_CasPhi12_S | AUUGCUCCUUACGAGGAGACCCCGUGCCAACU | 1811 |
| | GCAGC | |
| R4316_CasPhi12_S | AUUGCUCCUUACGAGGAGACUGGAUGCUGCAG | 1812 |
| | UUGGC | |
| R4317_CasPhi12_S | AUUGCUCCUUACGAGGAGACUGGUGGCAGUGG | 1813 |
| | ACAUG | |
| R4318_CasPhi12_S | AUUGCUCCUUACGAGGAGACCACUUCCCAAUG | 1814 |
| | GAAGC | |
| R4319_CasPhi12_S | AUUGCUCCUUACGAGGAGACCAUUGGGAAGUG | 1815 |
| | GAAGA | |
| R4320_CasPhi12_S | AUUGCUCCUUACGAGGAGACGGAAGUGGAAGA | 1816 |
| | CCUUA | |
| R4321_CasPhi12_S | AUUGCUCCUUACGAGGAGACGUGUCCGGAGGC | 1817 |
| | AGCCU | |
| R4322_CasPhi12_S | AUUGCUCCUUACGAGGAGACGCCACCAGGCGG | 1818 |
| | CCAGU | |
| R4323_CasPhi12_S | AUUGCUCCUUACGAGGAGACCUGCUGCCAUGC | 1819 |
| | CCCAG | |
| R4324_CasPhi12_S | AUUGCUCCUUACGAGGAGACCAGCCCUGGGGC | 1820 |
| | AUGGC | |
| R4325_CasPhi12_S | AUUGCUCCUUACGAGGAGACCAUUCCAGCCCU | 1821 |
| | GGGGC | |
| R4326_CasPhi12_S | AUUGCUCCUUACGAGGAGACGCAUUCCAGCCC | 1822 |
| | UGGGG | |
| R4327_CasPhi12_S | AUUGCUCCUUACGAGGAGACUGCAUUCCAGCC | 1823 |
| | CUGGG | |
| R4328_CasPhi12_S | AUUGCUCCUUACGAGGAGACAUUUUGCAUUCC | 1824 |
| | AGCCC | |
| R4329_CasPhi12_S | AUUGCUCCUUACGAGGAGACCAUCCAGUCAGG | 1825 |
| | GUCCA | |
| R4330_CasPhi12_S | AUUGCUCCUUACGAGGAGACUCCACGCUGUAG | 1826 |
| | GCUCC | |
| R4331_CasPhi12_S | AUUGCUCCUUACGAGGAGACCCACACACAGGU | 1827 |
| | UGUCC | |
| R4332_CasPhi12_S | AUUGCUCCUUACGAGGAGACUCCACUGGUCCU | 1828 |
| | GUCUG | |
| R4333_CasPhi12_S | AUUGCUCCUUACGAGGAGACCUGAAGGCCGGC | 1829 |
| | UCCGG | |

TABLE AD
CasΦ.12 gRNAs targeting Bak1 in CHO cells

| | Repeat + spacer | |
|---|---|---|
| | RNA Sequence | SEQ |
| | (5′ --> 3′), | ID |
| Name | shown as DNA | NO |
| R2452 | ATTGCTCCTTACGAGGAGACG | 1830 |
| Bak1_CasPhi12_1_S | AAGCTATGTTTTCCAT | |
| R2453 | ATTGCTCCTTACGAGGAGACG | 1831 |
| Bak1_CasPhi12_2_S | CAGGGGCAGCCGCCCC | |
| R2454 | ATTGCTCCTTACGAGGAGACC | 1832 |
| Bak1_CasPhi12_3_S | TCCTAGAACCCAACAG | |
| R2455 | ATTGCTCCTTACGAGGAGACG | 1833 |
| Bak1_CasPhi12_4_S | AAAGACCTCCTCTGTG | |
| R2456 | ATTGCTCCTTACGAGGAGACT | 1834 |
| Bak1_CasPhi12_5_S | CCATCTCGGGGTTGGC | |
| R2457 | ATTGCTCCTTACGAGGAGACT | 1835 |
| Bak1_CasPhi12_6_S | TCCTGATGGTGGAGAT | |
| R2849_Bak1_CasPhi12_ | ATTGCTCCTTACGAGGAGACC | 1836 |
| nsd_sg1_S | TGACTCCCAGCTCTGA | |
| R2850_Bak1_CasPhi12_ | ATTGCTCCTTACGAGGAGACT | 1837 |
| nsd_sg2_S | GGGGTCAGAGCTGGGA | |
| R2851_Bak1_CasPhi12_ | ATTGCTCCTTACGAGGAGACG | 1838 |
| nsd_sg3_S | AAAGACCTCCTCTGTG | |
| R2852_Bak1_ | ATTGCTCCTTACGAGGAGACC | 1839 |
| CasPhi12_nsd_sg4_S | GAAGCTATGTTTTCCA | |
| R2853_Bak1_ | ATTGCTCCTTACGAGGAGACG | 1840 |
| CasPhi12_nsd_sg5_S | AAGCTATGTTTTCCAT | |
| R2854_Bak1_ | ATTGCTCCTTACGAGGAGACT | 1841 |
| CasPhi12_nsd_sg6_S | CCATCTCCACCATCAG | |
| R2855_Bak1_ | ATTGCTCCTTACGAGGAGACC | 1842 |
| CasPhi12_nsd_sg7_S | CATCTCCACCATCAGG | |
| R2856_Bak1_ | ATTGCTCCTTACGAGGAGACC | 1843 |
| CasPhi12_nsd_sg8_S | TGATGGTGGAGATGGA | |
| R2857_Bak1_ | ATTGCTCCTTACGAGGAGACC | 1844 |
| CasPhi12_nsd_sg9_S | ATCTCCACCATCAGGA | |
| R2858_Bak1_ | ATTGCTCCTTACGAGGAGACT | 1845 |
| CasPhi12_nsd_sg10_S | TCCTGATGGTGGAGAT | |
| R2859_Bak1_ | ATTGCTCCTTACGAGGAGACG | 1846 |
| CasPhi12_nsd_sg11_S | CAGGGGCAGCCGCCCC | |
| R2860_Bak1_ | ATTGCTCCTTACGAGGAGACT | 1847 |
| CasPhi12_nsd_sg12_S | CCATCTCGGGGTTGGC | |
| R2861_Bak1_ | ATTGCTCCTTACGAGGAGACT | 1848 |
| CasPhi12_nsd_sg13_S | AGGAGCAAATTGTCCA | |
| R2862_Bak1_ | ATTGCTCCTTACGAGGAGACG | 1849 |
| CasPhi12_nsd_sg14_S | GTTCTAGGAGCAAATT | |
| R2863_Bak1_ | ATTGCTCCTTACGAGGAGACG | 1850 |
| CasPhi12_nsd_sg15_S | CTCCTAGAACCCAACA | |
| R2864_Bak1_ | ATTGCTCCTTACGAGGAGACC | 1851 |
| CasPhi12_nsd_sg16_S | TCCTAGAACCCAACAG | |
| R3977_Bak1_CasPhi12_ | ATTGCTCCTTACGAGGAGACT | 1852 |
| exon1_sg1_S | CCAGACGCCATCTTTC | |
| R3978_Bak1_CasPhi12_ | ATTGCTCCTTACGAGGAGACT | 1853 |
| exon1_sg2_S | GGTAAGAGTCCTCCTG | |
| R3979_Bak1_CasPhi12_ | ATTGCTCCTTACGAGGAGACT | 1854 |
| exon3_sg1_S | TACAGCATCTTGGGTC | |
| R3980_Bak1_CasPhi12_ | ATTGCTCCTTACGAGGAGACG | 1855 |
| exon3_sg2_S | GTCAGGTGGGCCGGCA | |
| R3981_Bak1_CasPhi12_ | ATTGCTCCTTACGAGGAGACC | 1856 |
| exon3_sg3_S | TATCATTGGAGATGAC | |
| R3982_Bak1_CasPhi12_ | ATTGCTCCTTACGAGGAGACG | 1857 |
| exon3_sg4_S | AGATGACATTAACCGG | |
| R3983_Bak1_CasPhi12_ | ATTGCTCCTTACGAGGAGACT | 1858 |
| exon3_sg5_S | GGAACTCTGTGTCGTA | |
| R3984_Bak1_CasPhi12_ | ATTGCTCCTTACGAGGAGACC | 1859 |
| exon3_sg6_S | AGAATTTACTGGAGCA | |
| R3985_Bak1_CasPhi12_ | ATTGCTCCTTACGAGGAGACA | 1860 |
| exon3_sg7_S | CTGGAGCAGCTGCAGC | |
| R3986_Bak1_CasPhi12_ | ATTGCTCCTTACGAGGAGACC | 1861 |
| exon3_sg8_S | CAGCTGTGGGCTGCAG | |
| R3987_Bak1_CasPhi12_ | ATTGCTCCTTACGAGGAGACG | 1862 |
| exon3_sg9_S | TAGGCATTCCCAGCTG | |
| R3988_Bak1_CasPhi12_ | ATTGCTCCTTACGAGGAGACG | 1863 |
| exon3_sg10_S | TGAAGAGTTCGTAGGC | |
| R3989_Bak1_CasPhi12_ | ATTGCTCCTTACGAGGAGACA | 1864 |
| exon3_sg11_S | CCAAGATTGCCTCCAG | |
| R3990_Bak1_CasPhi12_ | ATTGCTCCTTACGAGGAGACC | 1865 |
| exon3_sg12_S | CTCCAGGTACCCACCA | |

TABLE AE
CasΦ.12 gRNAs targeting Bax in CHO cells

| | Repeat + spacer | |
|---|---|---|
| | RNA Sequence | SEQ |
| | (5′ --> 3′), | ID |
| Name | shown as DNA) | NO |
| R2458 | ATTGCTCCTTACGAGGAGACC | 1866 |
| Bax_CasPhi12_1_S | TAATGTGGATACTAAC | |
| R2459 | ATTGCTCCTTACGAGGAGACT | 1867 |
| Bax_CasPhi12_2_S | TCCGTGTGGCAGCTGA | |
| R2460 | ATTGCTCCTTACGAGGAGACC | 1868 |
| Bax_CasPhi12_3_S | TGATGGCAACTTCAAC | |
| R2461 | ATTGCTCCTTACGAGGAGACT | 1869 |
| Bax_CasPhi12_4_S | ACTTTGCTAGCAAACT | |
| R2462 | ATTGCTCCTTACGAGGAGACA | 1870 |
| Bax_CasPhi12_5_S | GCACCAGTTTGCTAGC | |
| R2463 | ATTGCTCCTTACGAGGAGACA | 1871 |
| Bax_CasPhi12_6_S | ACTGGGGCCGGGTTGT | |
| R2865_Bax_CasPhi12_ | ATTGCTCCTTACGAGGAGACT | 1872 |
| nsd_sg1_S | TCTCTTTCCTGTAGGA | |
| R2866_Bax_CasPhi12_ | ATTGCTCCTTACGAGGAGACT | 1873 |
| nsd_sg2_S | CTTTCCTGTAGGATGA | |
| R2867_Bax_ | ATTGCTCCTTACGAGGAGACC | 1874 |
| CasPhi12_nsd_sg3_S | CTGTAGGATGATTGCT | |
| R2868_Bax_ | ATTGCTCCTTACGAGGAGACC | 1875 |
| CasPhi12_nsd_sg4_S | TGTAGGATGATTGCTA | |
| R2869_Bax_ | ATTGCTCCTTACGAGGAGACC | 1876 |
| CasPhi12_nsd_sg5_S | TAATGTGGATACTAAC | |
| R2870_Bax_ | ATTGCTCCTTACGAGGAGACT | 1877 |
| CasPhi12_nsd_sg6_S | TCCGTGTGGCAGCTGA | |
| R2871_Bax_ | ATTGCTCCTTACGAGGAGACC | 1878 |
| CasPhi12_nsd_sg7_S | GTGTGGCAGCTGACAT | |
| R2872_Bax_ | ATTGCTCCTTACGAGGAGACC | 1879 |
| CasPhi12_nsd_sg8_S | CATCAGCAAACATGTC | |
| R2873_Bax_ | ATTGCTCCTTACGAGGAGACA | 1880 |
| CasPhi12_nsd_sg9_S | AGTTGCCATCAGCAAA | |
| R2874_Bax_ | ATTGCTCCTTACGAGGAGACG | 1881 |
| CasPhi12_nsd_sg10_S | CTGATGGCAACTTCAA | |
| R2875_Bax_ | ATTGCTCCTTACGAGGAGACC | 1882 |
| CasPhi12_nsd_sg11_S | TGATGGCAACTTCAAC | |
| R2876_Bax_ | ATTGCTCCTTACGAGGAGACA | 1883 |
| CasPhi12_nsd_sg12_S | ACTGGGGCCGGGTTGT | |
| R2877_Bax_ | ATTGCTCCTTACGAGGAGACT | 1884 |
| CasPhi12_nsd_sg13_S | TGCCCTTTTCTACTTT | |
| R2878_Bax_ | ATTGCTCCTTACGAGGAGACC | 1885 |
| CasPhi12_nsd_sg14_S | CCTTTTCTACTTTGCT | |
| R2879_Bax_ | ATTGCTCCTTACGAGGAGACC | 1886 |
| CasPhi12_nsd_sg15_S | TAGCAAAGTAGAAAAG | |
| R2880_Bax_ | ATTGCTCCTTACGAGGAGACG | 1887 |
| CasPhi12_nsd_sg16_S | CTAGCAAAGTAGAAAA | |
| R2881_Bax_ | ATTGCTCCTTACGAGGAGACT | 1888 |
| CasPhi12_nsd_sg17_S | CTACTTTGCTAGCAAA | |
| R2882_Bax_ | ATTGCTCCTTACGAGGAGACC | 1889 |
| CasPhi12_nsd_sg18_S | TACTTTGCTAGCAAAC | |
| R2883_Bax_ | ATTGCTCCTTACGAGGAGACT | 1890 |
| CasPhi12_nsd_sg19_S | ACTTTGCTAGCAAACT | |
| R2884_Bax_ | ATTGCTCCTTACGAGGAGACG | 1891 |
| CasPhi12_nsd_sg20_S | CTAGCAAACTGGTGCT | |
| R2885_Bax_ | ATTGCTCCTTACGAGGAGACC | 1892 |
| CasPhi12_nsd_sg21_S | TAGCAAACTGGTGCTC | |
| R2886_Bax_ | ATTGCTCCTTACGAGGAGACA | 1893 |
| CasPhi12_nsd_sg22_S | GCACCAGTTTGCTAGC | |

TABLE AF
CasΦ.12 gRNAs targeting Fut8 in CHO cells

| | Repeat + spacer | |
|---|---|---|
| | RNA Sequence | SEQ |
| | (5′ --> ′), | ID |
| Name | shown as DNA) | NO |
| R2464 | ATTGCTCCTTACGAGGAGACC | 1894 |
| Fut8_CasPhi12_1_S | CACTTTGTCAGTGCGT | |
| R2465 | ATTGCTCCTTACGAGGAGACC | 1895 |
| Fut8_CasPhi12_2_S | TCAATGGGATGGAAGG | |
| R2466 | ATTGCTCCTTACGAGGAGACA | 1896 |
| Fut8_CasPhi12_3_S | GGAATACATGGTACAC | |
| R2467 | ATTGCTCCTTACGAGGAGACA | 1897 |
| Fut8_CasPhi12_4_S | AGAACATTTTCAGCTT | |
| R2468 | ATTGCTCCTTACGAGGAGACA | 1898 |
| Fut8_CasPhi12_5_S | TCCACTTTCATTCTGC | |
| R2469 | ATTGCTCCTTACGAGGAGACT | 1899 |
| Fut8_CasPhi12_6_S | TTGTTAAAGGAGGCAA | |
| R2887_Fut8_ | ATTGCTCCTTACGAGGAGACT | 1900 |
| CasPhi12_nsd_sg1_S | CCCCAGAGTCCATGTC | |
| R2888_Fut8_ | ATTGCTCCTTACGAGGAGACT | 1901 |
| CasPhi12_nsd_sg2_S | CAGTGCGTCTGACATG | |
| R2889_Fut8_ | ATTGCTCCTTACGAGGAGACG | 1902 |
| CasPhi12_nsd_sg3_S | TCAGTGCGTCTGACAT | |
| R2890_Fut8_ | ATTGCTCCTTACGAGGAGACC | 1903 |
| CasPhi12_nsd_sg4_S | CACTTTGTCAGTGCGT | |
| R2891_Fut8_ | ATTGCTCCTTACGAGGAGACT | 1904 |
| CasPhi12_nsd_sg5_S | GTTCCCACTTTGTCAG | |
| R2892_Fut8_ | ATTGCTCCTTACGAGGAGACC | 1905 |
| CasPhi12_nsd_sg6_S | TCAATGGGATGGAAGG | |
| R2893_Fut8_ | ATTGCTCCTTACGAGGAGACC | 1906 |
| CasPhi12_nsd_sg7_S | ATCCCATTGAGGAATA | |
| R2894_Fut8_ | ATTGCTCCTTACGAGGAGACA | 1907 |
| CasPhi12_nsd_sg8_S | GGAATACATGGTACAC | |
| R2895_Fut8_ | ATTGCTCCTTACGAGGAGACA | 1908 |
| CasPhi12_nsd_sg9_S | ACGTGTACCATGTATT | |
| R2896_Fut8_ | ATTGCTCCTTACGAGGAGACT | 1909 |
| CasPhi12_nsd_sg10_S | TCAACGTGTACCATGT | |
| R2897_Fut8_ | ATTGCTCCTTACGAGGAGACA | 1910 |
| CasPhi12_nsd_sg11_S | AGAACATTTTCAGCTT | |
| R2898_Fut8_ | ATTGCTCCTTACGAGGAGACG | 1911 |
| CasPhi12_nsd_sg12_S | AGAAGCTGAAAATGTT | |
| R2899_Fut8_ | ATTGCTCCTTACGAGGAGACT | 1912 |
| CasPhi12_nsd_sg13_S | CAGCTTCTCGAACGCA | |
| R2900_Fut8_ | ATTGCTCCTTACGAGGAGACC | 1913 |
| CasPhi12_nsd_sg14_S | AGCTTCTCGAACGCAG | |
| R2901_Fut8_ | ATTGCTCCTTACGAGGAGACT | 1914 |
| CasPhi12_nsd_sg15_S | GCGTTCGAGAAGCTGA | |
| R2902_Fut8_ | ATTGCTCCTTACGAGGAGACA | 1915 |
| CasPhi12_nsd_sg16_S | GCTTCTCGAACGCAGA | |
| R2903_Fut8_ | ATTGCTCCTTACGAGGAGACA | 1916 |
| CasPhi12_nsd_sg17_S | TTCTGCGTTCGAGAAG | |
| R2904_Fut8_ | ATTGCTCCTTACGAGGAGACC | 1917 |
| CasPhi12_nsd_sg18_S | ATTCTGCGTTCGAGAA | |
| R2905_Fut8_ | ATTGCTCCTTACGAGGAGACT | 1918 |
| CasPhi12_nsd_sg19_S | CGAACGCAGAATGAAA | |
| R2906_Fut8_ | ATTGCTCCTTACGAGGAGACA | 1919 |
| CasPhi12_nsd_sg20_S | TCCACTTTCATTCTGC | |
| R2907_Fut8_ | ATTGCTCCTTACGAGGAGACT | 1920 |
| CasPhi12_nsd_sg21_S | ATCCACTTTCATTCTG | |
| R2908_Fut8_ | ATTGCTCCTTACGAGGAGACT | 1921 |
| CasPhi12_nsd_s822_S | TATCCACTTTCATTCT | |
| R2909_Fut8_ | ATTGCTCCTTACGAGGAGACT | 1922 |
| CasPhi12_nsd_sg23_S | TTATCCACTTTCATTC | |
| R2910_Fut8_ | ATTGCTCCTTACGAGGAGACT | 1923 |
| CasPhi12_nsd_sg24_S | TTTATCCACTTTCATT | |
| R2911_Fut8_ | ATTGCTCCTTACGAGGAGACA | 1924 |
| CasPhi12_nsd_sg25_S | ACAAAGAAGGGTCATC | |
| R2912_Fut8_ | ATTGCTCCTTACGAGGAGACC | 1925 |
| CasPhi12_nsd_sg26_S | CTCCTTTAACAAAGAA | |
| R2913_Fut8_ | ATTGCTCCTTACGAGGAGACG | 1926 |
| CasPhi12_nsd_sg27_S | CCTCCTTTAACAAAGA | |
| R2914_Fut8_ | ATTGCTCCTTACGAGGAGACT | 1927 |
| CasPhi12_nsd_sg28_S | TTGTTAAAGGAGGCAA | |
| R2915_Fut8_ | ATTGCTCCTTACGAGGAGACG | 1928 |
| CasPhi12_nsd_sg29_S | TTAAAGGAGGCAAAGA | |
| R2916_Fut8_ | ATTGCTCCTTACGAGGAGACT | 1929 |
| CasPhi12_nsd_sg30_S | TAAAGGAGGCAAAGAC | |
| R2917_Fut8_ | ATTGCTCCTTACGAGGAGACT | 1930 |
| CasPhi12_nsd_sg31_S | CTTTGCCTCCTTTAAC | |
| R2918_Fut8_ | ATTGCTCCTTACGAGGAGACG | 1931 |
| CasPhi12_nsd_sg32_S | TCTTTGCCTCCTTTAA | |
| R2919_Fut8_ | ATTGCTCCTTACGAGGAGACG | 1932 |
| CasPhi12_nsd_sg33_S | TCTAACTTACTTTGTC | |
| R2920_Fut8_ | ATTGCTCCTTACGAGGAGACT | 1933 |
| CasPhi12_nsd_sg34_S | TGGTCTAACTTACTTT | |

TABLE AG
CasΦ.12 gRNAs targeting Fut8

| | | | Repeat | Spacer | crRNA |
|---|---|---|---|---|---|
| | Repeat | Spacer | sequence | sequence | sequence |
| Name | length | length | (5′ --> 3′) | (5′ --> 3′) | (5′ --> 3′) |
| R3582 | 36 | 30 | CUUUCAAGA | AGGAAUACAU | CUUUCAAGACUAA |
| | | | CUAAUAGAU | GGUACACGUU | UAGAUUGCUCCUU |
| | | | UGCUCCUUA | GAAGAACAUU | ACGAGGAGACAGG |
| | | | CGAGGAGAC | (SEQ ID NO: | AAUACAUGGUACA |
| | | | (SEQ ID NO: | 1482) | CGUUGAAGAACAU |
| | | | 2469) | | U (SEQ ID |
| | | | | | NO: 1499) |
| R3583 | 36 | 29 | CUUUCAAGA | AGGAAUACAU | CUUUCAAGACUAA |
| | | | CUAAUAGAU | GGUACACGUU | UAGAUUGCUCCUU |
| | | | UGCUCCUUA | GAAGAACAU | ACGAGGAGACAGG |
| | | | CGAGGAGAC | (SEQ ID NO: | AAUACAUGGUACA |
| | | | (SEQ ID NO: | 1483) | CGUUGAAGAACAU |
| | | | 2469) | | (SEQ ID NO: 1500) |
| R3584 | 36 | 28 | CUUUCAAGA | AGGAAUACAU | CUUUCAAGACUAA |
| | | | CUAAUAGAU | GGUACACGUU | UAGAUUGCUCCUU |
| | | | UGCUCCUUA | GAAGAACA | ACGAGGAGACAGG |
| | | | CGAGGAGAC | (SEQ ID NO: | AAUACAUGGUACA |
| | | | (SEQ ID NO: | 1484) | CGUUGAAGAACA |
| | | | 2469) | | (SEQ ID NO: 1501) |
| R3585 | 36 | 27 | CUUUCAAGA | AGGAAUACAU | CUUUCAAGACUAA |
| | | | CUAAUAGAU | GGUACACGUU | UAGAUUGCUCCUU |
| | | | UGCUCCUUA | GAAGAAC | ACGAGGAGACAGG |
| | | | CGAGGAGAC | (SEQ ID NO: | AAUACAUGGUACA |
| | | | (SEQ ID NO: | 1485) | CGUUGAAGAAC |
| | | | 2469) | | (SEQ ID NO: 1502) |
| R3586 | 36 | 26 | CUUUCAAGA | AGGAAUACAU | CUUUCAAGACUAA |
| | | | CUAAUAGAU | GGUACACGUU | UAGAUUGCUCCUU |
| | | | UGCUCCUUA | GAAGAA (SEQ | ACGAGGAGACAGG |
| | | | CGAGGAGAC | ID NO: 1486) | AAUACAUGGUACA |
| | | | (SEQ ID NO: | | CGUUGAAGAA (SEQ |
| | | | 2469) | | ID NO: 1503) |
| R3587 | 36 | 25 | CUUUCAAGA | AGGAAUACAU | CUUUCAAGACUAA |
| | | | CUAAUAGAU | GGUACACGUU | UAGAUUGCUCCUU |
| | | | UGCUCCUUA | GAAGA (SEQ | ACGAGGAGACAGG |
| | | | CGAGGAGAC | ID NO: 1487) | AAUACAUGGUACA |
| | | | (SEQ ID NO: | | CGUUGAAGA (SEQ |
| | | | 2469) | | ID NO: 1504) |
| R3588 | 36 | 24 | CUUUCAAGA | AGGAAUACAU | CUUUCAAGACUAA |
| | | | CUAAUAGAU | GGUACACGUU | UAGAUUGCUCCUU |
| | | | UGCUCCUUA | GAAG (SEQ ID | ACGAGGAGACAGG |
| | | | CGAGGAGAC | NO: 1488) | AAUACAUGGUACA |
| | | | (SEQ ID NO: | | CGUUGAAG (SEQ ID |
| | | | 2469) | | NO: 1505) |
| R3589 | 36 | 23 | CUUUCAAGA | AGGAAUACAU | CUUUCAAGACUAA |
| | | | CUAAUAGAU | GGUACACGUU | UAGAUUGCUCCUU |
| | | | UGCUCCUUA | GAA (SEQ ID | ACGAGGAGACAGG |
| | | | CGAGGAGAC | NO: 1489) | AAUACAUGGUACA |
| | | | (SEQ ID NO: | | CGUUGAA (SEQ ID |
| | | | 2469) | | NO: 1506) |
| R3590 | 36 | 22 | CUUUCAAGA | AGGAAUACAU | CUUUCAAGACUAA |
| | | | CUAAUAGAU | GGUACACGUU | UAGAUUGCUCCUU |
| | | | UGCUCCUUA | GA | ACGAGGAGACAGG |
| | | | CGAGGAGAC | (SEQ ID NO: | AAUACAUGGUACA |
| | | | (SEQ ID NO: | 1490) | CGUUGA (SEQ ID |
| | | | 2469) | | NO: 1507) |
| R3591 | 36 | 21 | CUUUCAAGA | AGGAAUACAU | CUUUCAAGACUAA |
| | | | CUAAUAGAU | GGUACACGUU | UAGAUUGCUCCUU |
| | | | UGCUCCUUA | G (SEQ ID NO: | ACGAGGAGACAGG |
| | | | CGAGGAGAC | 1491) | AAUACAUGGUACA |
| | | | (SEQ ID NO: | | CGUUG (SEQ ID |
| | | | 2469) | | NO: 1508) |
| R3592 | 36 | 20 | CUUUCAAGA | AGGAAUACAU | CUUUCAAGACUAA |
| | | | CUAAUAGAU | GGUACACGUU | UAGAUUGCUCCUU |
| | | | UGCUCCUUA | (SEQ ID NO: | ACGAGGAGACAGG |
| | | | CGAGGAGAC | 1492) | AAUACAUGGUACA |
| | | | (SEQ ID NO: | | CGUU (SEQ ID |
| | | | 2469) | | NO: 1509) |
| R3593 | 36 | 19 | CUUUCAAGA | AGGAAUACAU | CUUUCAAGACUAA |
| | | | CUAAUAGAU | GGUACACGU | UAGAUUGCUCCUU |
| | | | UGCUCCUUA | (SEQ ID NO: | ACGAGGAGACAGG |
| | | | CGAGGAGAC | 1493) | AAUACAUGGUACA |
| | | | (SEQ ID NO: | | CGU (SEQ ID |
| | | | 2469) | | NO: 1510) |
| R3594 | 36 | 18 | CUUUCAAGA | AGGAAUACAU | CUUUCAAGACUAA |
| | | | CUAAUAGAU | GGUACACG | UAGAUUGCUCCUU |
| | | | UGCUCCUUA | (SEQ ID NO: | ACGAGGAGACAGG |
| | | | CGAGGAGAC | 1494) | AAUACAUGGUACA |
| | | | (SEQ ID NO: | | CG (SEQ ID |
| | | | 2469) | | NO: 1511) |
| R3595 | 36 | 17 | CUUUCAAGA | AGGAAUACAU | CUUUCAAGACUAA |
| | | | CUAAUAGAU | GGUACAC | UAGAUUGCUCCUU |
| | | | UGCUCCUUA | (SEQ ID NO: | ACGAGGAGACAGG |
| | | | CGAGGAGAC | 1495) | AAUACAUGGUACA |
| | | | (SEQ ID NO: | | C (SEQ ID |
| | | | 2469) | | NO: 1512) |
| R3596 | 36 | 16 | CUUUCAAGA | AGGAAUACAU | CUUUCAAGACUAA |
| | | | CUAAUAGAU | GGUACA (SEQ | UAGAUUGCUCCUU |
| | | | UGCUCCUUA | ID NO: 1496) | ACGAGGAGACAGG |
| | | | CGAGGAGAC | | AAUACAUGGUACA |
| | | | (SEQ ID NO: | | (SEQ ID |
| | | | 2469) | | NO: 1513) |
| R3597 | 36 | 15 | CUUUCAAGA | AGGAAUACAU | CUUUCAAGACUAA |
| | | | CUAAUAGAU | GGUAC (SEQ ID | UAGAUUGCUCCUU |
| | | | UGCUCCUUA | NO: 1497) | ACGAGGAGACAGG |
| | | | CGAGGAGAC | | AAUACAUGGUAC |
| | | | (SEQ ID NO: | | (SEQ ID |
| | | | 2469) | | NO: 1514) |
| R3598 | 35 | 20 | UUUCAAGAC | AGGAAUACAU | UUUCAAGACUAAU |
| | | | UAAUAGAUU | GGUACACGUU | AGAUUGCUCCUUA |
| | | | GCUCCUUAC | (SEQ ID NO: | CGAGGAGACAGGA |
| | | | GAGGAGAC | 1498) | AUACAUGGUACAC |
| | | | (SEQ ID NO: | | GUU (SEQ ID |
| | | | 1466) | | NO: 1515) |
| R3599 | 34 | 20 | UUCAAGACU | AGGAAUACAU | UUCAAGACUAAUA |
| | | | AAUAGAUUG | GGUACACGUU | GAUUGCUCCUUAC |
| | | | CUCCUUACG | (SEQ ID NO: | GAGGAGACAGGAA |
| | | | AGGAGAC | 1498) | UACAUGGUACACG |
| | | | (SEQ ID NO: | | UU (SEQ ID |
| | | | 1467) | | NO: 1516) |
| R3600 | 33 | 20 | UCAAGACUA | AGGAAUACAU | UCAAGACUAAUAG |
| | | | AUAGAUUGC | GGUACACGUU | AUUGCUCCUUACG |
| | | | UCCUUACGA | (SEQ ID NO: | AGGAGACAGGAAU |
| | | | GGAGAC (SEQ | 1498) | ACAUGGUACACGU |
| | | | ID NO: 1468) | | U (SEQ ID |
| | | | | | NO: 1517) |
| R3601 | 32 | 20 | CAAGACUAA | AGGAAUACAU | CAAGACUAAUAGA |
| | | | UAGAUUGCU | GGUACACGUU | UUGCUCCUUACGA |
| | | | CCUUACGAG | (SEQ ID NO: | GGAGACAGGAAUA |
| | | | GAGAC (SEQ | 1498) | CAUGGUACACGUU |
| | | | ID NO: 1469) | | (SEQ ID NO: 1518) |
| R3602 | 31 | 20 | AAGACUAAU | AGGAAUACAU | AAGACUAAUAGAU |
| | | | AGAUUGCUC | GGUACACGUU | UGCUCCUUACGAG |
| | | | CUUACGAGG | (SEQ ID NO: | GAGACAGGAAUAC |
| | | | AGAC (SEQ ID | 1498) | AUGGUACACGUU |
| | | | NO: 1470) | | (SEQ ID NO: 1519) |
| R3603 | 30 | 20 | AGACUAAUA | AGGAAUACAU | AGACUAAUAGAUU |
| | | | GAUUGCUCC | GGUACACGUU | GCUCCUUACGAGG |
| | | | UUACGAGGA | (SEQ ID NO: | AGACAGGAAUACA |
| | | | GAC (SEQ ID | 1498) | UGGUACACGUU |
| | | | NO: 1471) | | (SEQ ID NO: 1520) |
| R3604 | 29 | 20 | GACUAAUAG | AGGAAUACAU | GACUAAUAGAUUG |
| | | | AUUGCUCCU | GGUACACGUU | CUCCUUACGAGGA |
| | | | UACGAGGAG | (SEQ ID NO: | GACAGGAAUACAU |
| | | | AC (SEQ ID | 1498) | GGUACACGUU (SEQ |
| | | | NO: 1472) | | ID NO: 1521) |
| R3605 | 28 | 20 | ACUAAUAGA | AGGAAUACAU | ACUAAUAGAUUGC |
| | | | UUGCUCCUU | GGUACACGUU | UCCUUACGAGGAG |
| | | | ACGAGGAGA | (SEQ ID NO: | ACAGGAAUACAUG |
| | | | C (SEQ ID NO: | 1498) | GUACACGUU (SEQ |
| | | | 1473) | | ID NO: 1522) |
| R3606 | 27 | 20 | CUAAUAGAU | AGGAAUACAU | CUAAUAGAUUGCU |
| | | | UGCUCCUUA | GGUACACGUU | CCUUACGAGGAGA |
| | | | CGAGGAGAC | (SEQ ID NO: | CAGGAAUACAUGG |
| | | | (SEQ ID NO: | 1498) | UACACGUU (SEQ ID |
| | | | 1474) | | NO: 1523) |
| R3607 | 26 | 20 | UAAUAGAUU | AGGAAUACAU | UAAUAGAUUGCUC |
| | | | GCUCCUUAC | GGUACACGUU | CUUACGAGGAGAC |
| | | | GAGGAGAC | (SEQ ID NO: | AGGAAUACAUGGU |
| | | | (SEQ ID NO: | 1498) | ACACGUU (SEQ ID |
| | | | 1475) | | NO: 1524) |
| R3608 | 25 | 20 | AAUAGAUUG | AGGAAUACAU | AAUAGAUUGCUCC |
| | | | CUCCUUACG | GGUACACGUU | UUACGAGGAGACA |
| | | | AGGAGAC | AGGAAUACAU | GGAAUACAUGGUA |
| | | | (SEQ ID NO: | GGUACACGUU | CACGUU (SEQ ID |
| | | | 1476) | (SEQ ID NO: | NO: 1525) |
| | | | | 2487) | |
| R3609 | 24 | 20 | AUAGAUUGC | AGGAAUACAU | AUAGAUUGCUCCU |
| | | | UCCUUACGA | GGUACACGUU | UACGAGGAGACAG |
| | | | GGAGAC (SEQ | AGGAAUACAU | GAAUACAUGGUAC |
| | | | ID NO: 1477) | GGUACACGUU | ACGUU (SEQ ID |
| | | | | (SEQ ID NO: | NO: 1526) |
| | | | | 2487) | |
| R3610 | 23 | 20 | UAGAUUGCU | AGGAAUACAU | UAGAUUGCUCCUU |
| | | | CCUUACGAG | GGUACACGUU | ACGAGGAGACAGG |
| | | | GAGAC (SEQ | AGGAAUACAU | AAUACAUGGUACA |
| | | | ID NO: 1478) | GGUACACGUU | CGUU (SEQ ID |
| | | | | (SEQ ID NO: | NO: 1527) |
| | | | | 2487) | |
| R3611 | 22 | 20 | AGAUUGCUC | AGGAAUACAU | AGAUUGCUCCUUA |
| | | | CUUACGAGG | GGUACACGUU | CGAGGAGACAGGA |
| | | | AGAC (SEQ ID | AGGAAUACAU | AUACAUGGUACAC |
| | | | NO: 1479) | GGUACACGUU | GUU (SEQ ID |
| | | | | (SEQ ID NO: | NO: 1528) |
| | | | | 2487) | |
| R3612 | 21 | 20 | GAUUGCUCC | AGGAAUACAU | GAUUGCUCCUUAC |
| | | | UUACGAGGA | GGUACACGUU | GAGGAGACAGGAA |
| | | | GAC (SEQ ID | AGGAAUACAU | UACAUGGUACACG |
| | | | NO: 1480) | GGUACACGUU | UU (SEQ ID |
| | | | | (SEQ ID NO: | NO: 1529) |
| | | | | 2487) | |
| R3613 | 20 | 20 | AUUGCUCCU | AGGAAUACAU | AUUGCUCCUUACG |
| | | | UACGAGGAG | GGUACACGUU | AGGAGACAGGAAU |
| | | | AC (SEQ ID | AGGAAUACAU | ACAUGGUACACGU |
| | | | NO: 1481) | GGUACACGUU | U (SEQ ID |
| | | | | (SEQ ID NO: | NO: 1530) |
| | | | | 2487) | |

TABLE AH
Casd.12 gRNAs targeting B2M and TRAC

| | | | Repeat | Spacer | |
|---|---|---|---|---|---|
| | | | sequence | sequence | crRNA sequence |
| Name | Target | Modification | (5′ --> 3′) | (5′ --> 3′) | (5′ --> 3′) |
| R3150 | B2M | Unmodified, | AUUGCUC | CAGUGGGGG | AUUGCUCCUUAC |
| 20-20 | Exon 2 | 2′OMe at last | CUUACGA | UGAAUUCAG | GAGGAGACCAG |
| | | 31 base (2me) | GGAGAC | UG (SEQ ID | UGGGGGUGAAU |
| | | 2′OMe at last | (SEQ ID | NO: 1434) | UCAGUG (SEQ ID |
| | | two 3′ bases | NO: 1433) | | NO: 1435) |
| | | (2me) | | | |
| | | 2′OMe at last | | | |
| | | three 3′ bases | | | |
| | | (3me) | | | |
| R3042 | TRAC | Unmodified, | AUUGCUC | GAGUCUCUC | AUUGCUCCUUAC |
| 20-20 | Exon 1 | 2me | CUUACGA | AGCUGGUAC | GAGGAGACGAG |
| | | 2me | GGAGAC | AC (SEQ ID | UCUCUCAGCUGG |
| | | 3me | (SEQ ID | NO: 1436) | UACAC (SEQ ID |
| | | | NO: 1433) | | NO: 1437) |
| R3150 | B2M | Unmodified, | AUUGCUC | CAGUGGGGG | AUUGCUCCUUAC |
| 20-17 | Exon 2 | 2me | CUUACGA | UGAAUUCA | GAGGAGACCAG |
| | | 2me | GGAGAC | (SEQ ID NO: | UGGGGGUGAAU |
| | | 3me | (SEQ ID | 1438) | UCA (SEQ ID |
| | | | NO: 1433) | | NO: 1439) |
| R3042 | TRAC | Unmodified, | AUUGCUC | CAGUGGGGG | AUUGCUCCUUAC |
| 20-17 | Exon 1 | 2me | CUUACGA | UGAAUUCA | GAGGAGACGAG |
| | | 2me | GGAGAC | (SEQ ID NO: | UCUCUCAGCUGG |
| | | 3me | (SEQ ID | 1440) | UA (SEQ ID |
| | | | NO: 1433) | | NO: 1441) |

[0248] In some embodiments, the guide nucleic acid comprises a spacer sequence that is the same as or differs by no more than 5 nucleotides from a spacer sequence from Tables A to H by no more than 4 nucleotides from a spacer sequence from Tables A to H, by no more than 3 nucleotides from a spacer sequence from Tables A to H, no more than 2 nucleotides from a spacer sequence from Tables A to H, or no more than 1 nucleotide from a spacer sequence from Tables A to H. A difference may be addition, deletion or substitution and where there are multiple differences, the differences may be addition, deletion and/or substitution.

[0249] In some embodiments, the guide nucleic acid comprises a sequence that is the same as or differs by no more than 5 nucleotides from a sequence from Tables I to AH by no more than 4 nucleotides from a sequence from Tables I to AH, by no more than 3 nucleotides from a sequence from Tables I to X, no more than 2 nucleotides from a sequence from Table I to AH, or no more than 1 nucleotide from a sequence from Tables I to AH. A difference may be addition, deletion or substitution and where there are multiple differences, the differences may be addition, deletion and/or substitution.

[0250] In some embodiments, the guide nucleic acid comprises a sequence that is at least 30, at least 31, at least 32, at least 33, at least 34, at least 35, at least 36, at least 37, at least 38, at least 39, at least 40, at least 41, at least 42, at least 43, at least 44, at least 45, at least 46, at least 47, at least 48, at least 49, at least 50, at least 51, at least 52, at least 53, at least 54, at least 55, at least 56 or at least 57 contiguous nucleobases of a sequence from Tables I to X, AG and AH (SEQ ID NO: 547-1404, 1433-1441, 1466-1530 or 2112-2289).

[0251] In some embodiments, the guide nucleic acid comprises a sequence that is 30, 31, 32, 33, 34, 35, 36, 37, 38, 39, 40, 41, 42, 43, 44, 45, 46, 47, 48, 49, 50, 51, 52, 53, 54, 55, 56 or 57 contiguous nucleobases of a sequence from Tables I to X, AG and AH (SEQ ID NO: 547-1404, 1433-1441, 1466-1530 or 2112-2289).

[0252] In some embodiments, the guide nucleic acid comprises a sequence that is at least 30, at least 31, at least 32, at least 33, at least 34, at least 35, at least 36 or at least 37 contiguous nucleobases of a sequence from Tables Y to AF (SEQ ID NO: 1533-1933 or 2290-2467).

[0253] In some embodiments, the guide nucleic acid comprises a sequence that is 30, 31, 32, 33, 34, 35, 36 or 37 contiguous nucleobases of a sequence from Tables Y to AF (SEQ ID NO: 1533-1933 or 2290-2467).

[0254] In some embodiments, the guide nucleic acid comprises a repeat sequence from Table 2 and a spacer sequence from Tables A to H

[0255] In the sequences provided in Tables A-AH, the base T is interchangeable with U when a guide nucleic either is or comprises ribonucleic or deoxyribonucleic nucleosides.

### Coding Sequences and Expression Vectors

[0256] In some aspects, the present disclosure provides a nucleic acid encoding a programmable CasΦ nuclease disclosed herein. In some embodiments, the nucleic acid is a vector, preferably the vector is an expression vector. Suitable expression vectors are easily identifiable for the cell type of interest. For example, an expression vector comprises a suitable promoter for transcription in the cell type of interest. An expression vector can also include other elements to support transcription, such as a Woodchuck Hepatitis Virus (WHP) Posttranscriptional regulatory Element (WPRE).

[0257] In some embodiments, a nucleic acid encoding a programmable CasΦ nuclease (e.g. within an expression vector) comprises elements suitable for expression in a eukaryotic cell. In some embodiments, the nucleic acid comprises a promoter suitable for transcription in a eukaryotic cell e.g. containing a TATA box and/or a TFIIB recognition element. The nucleic acid (e.g. within an expression vector) will typically include a promoter suitable for transcription in a eukaryotic cell upstream of the sequence encoding the programmable CasΦ nuclease, and may include a transcription terminator downstream of the sequence encoding the programmable CasΦ nuclease. The nucleic acid (e.g. within an expression vector) may also include enhancer(s) upstream and/or downstream of the sequence encoding the programmable CasΦ nuclease. A promoter may be an inducible promoter. The nucleic acid may also comprise a guide RNA. Suitable promoters are well known in the art and include the CMV promoter, EF1a promoter, intron-less EF1a short promoter, SV40 promoter, human or mouse PGK1 promoter, Ubc (ubiquitin C) promoter and mouse or human U6 promoter. Suitable mammalian promoters include the EF1a promoter, intron-less EF1a short promoter, and human U6 promoter.

[0258] In some embodiments, the vector is a viral vector. In some embodiments, the vector is a retroviral vector or a lentiviral vector. In preferred embodiments, the vector is an adeno-associated viral (AAV) vector. Several serotypes are available for AAV vectors that can be used in the compositions and methods disclosed herein, including AAV1, AAV2, AAV5, AAV6, AAV8, AAV9 and AAV DJ. In more preferred embodiments, the AAV vector is an AAV DJ vector.

[0259] A vector may be integrated into a host cell genome.

[0260] In some embodiments, a vector comprises a nucleic acid encoding a programmable CasΦ nuclease. In some embodiments, a vector comprises a nucleic acid encoding a guide nucleic acid. In some embodiments, a vector comprises a donor polynucleotide. In some embodiments, a nucleic acid encoding a programmable CasΦ nuclease, a nucleic acid encoding a guide nucleic acid and a donor polynucleotide are comprised by separate vectors. In some embodiments, a vector comprises a nucleic acid encoding a programmable CasΦ nuclease and a nucleic acid encoding a guide nucleic acid.

[0261] It is well known in the field that the large size of Cas9 nucleases makes Cas9 impractical for several applications. For example, packaging vectors into viral particles becomes more difficult as the size of the vector increases. It is therefore difficult to include other components in a viral vector that includes a nucleic acid encoding a Cas9 nuclease. Accordingly, one of the advantages of the programmable CasΦ nucleases disclosed herein arises from the smaller size of the programmable CasΦ nucleases which allows vectors comprising a nucleic acid encoding a programmable CasΦ nuclease to be easily packaged into viral particles when the vector also includes nucleic acids encoding other components, such a nucleic acid encoding a guide nucleic acid and/or donor polynucleotide. In preferred embodiments, a vector encodes a nucleic acid encoding a programmable CasΦ nuclease and a nucleic acid encoding a guide nucleic acid. In preferred embodiments, a vector encodes a nucleic acid encoding a programmable CasΦ nuclease, a nucleic acid encoding a guide nucleic acid and a donor polynucleotide. In some preferred embodiments, a vector comprises up to 1 kb donor polynucleotide, a promoter for expression of a guide nucleic acid, a nucleic acid encoding the nucleic acid, a mammalian promoter for expression of a programmable CasΦ nuclease, a nucleic acid encoding the programmable CasΦ nuclease, and a polyA signal. In alternative preferred embodiments, the donor polynucleotide is included in a nucleic acid encoding a tag, such as a fluorescent protein. In further preferred embodiments, the programmable CasΦ nuclease encoded by the vector is fuzed or linked to two nuclear localization signals.

[0262] In some embodiments, the expression vector comprises elements suitable for expression in a prokaryotic cell. In some embodiments, the expression vector comprises a promoter suitable for transcription in a prokaryotic cell e.g. comprising a Shine Dalgarno sequence.

[0263] In some embodiments, a CasΦ nuclease, a guide nucleic acid, or a nucleic acid encoding any combination thereof, may be inserted into a host cell by manner of electroporation, nucleofection, chemical methods, transfection, transduction, transformation, or microinjection. In some embodiments, a CasΦ nuclease, a guide nucleic acid, or a nucleic acid encoding any combination thereof, may be introduced into a cell by squeezing the cell to deform it, thereby disrupting the cell membrane and allowing the CasΦ nuclease, the guide nucleic acid, or the nucleic acid encoding any combination thereof, to pass into the cell.

[0264] In some embodiments, an Amaxa 4D nucleofector may be used to carry out nucleofection. In some embodiments, the chemical method or transfection comprises lipofectamine.

[0265] Lipid nanoparticle (LNP) delivery is one of the most clinically advanced non-viral delivery systems for gene therapy. LNPs have many properties that make them ideal candidates for delivery of nucleic acids, including ease of manufacture, low cytotoxicity and immunogenicity, high efficiency of nucleic acid encapsulation and cell transfection, multidosing capabilities and flexibility of design (Kulkarni et al., (2018) Nucleic Acid Therapeutics). In some embodiments, LNP is used to deliver a nucleic acid encoding a programmable CasΦ nuclease described herein. In some embodiments, LNP is used to deliver a nucleic acid encoding a guide nucleic acid. In some embodiments, LNP is used to deliver a nucleic acid encoding a programmable CasΦ nuclease and a guide nucleic acid. In some embodiments, the LNP has an amine group to phosphate (N/P) ratio of between 2 and 10, between 3 and 10, or between 5 and 9. In preferred embodiments, the LNP has a N/P ratio of between 5 and 9. In more preferred embodiments, the LNP has a N/P ratio of 5. In some embodiments, the LNP additional components, e.g., nucleic acids, proteins, peptides, small molecules, sugars, lipids.

[0266] In more preferred embodiments, the LNP has a N/P ratio of 4 to 5. In preferred embodiments, the LNP comprises a nucleic acid encoding a programmable CasΦ nuclease, and the LNP has an N/P ratio of 4 to 5.

### Target Nucleic Acid and Sample

[0267] A wide array of samples is compatible with the compositions and methods disclosed herein. The samples, as described herein, may be used in the methods of nicking a target nucleic acid disclosed herein. The samples, as described herein, may be used in the DETECTR assay methods disclosed herein. The samples, as described herein, are compatible with any of the programmable nucleases disclosed herein and use of said programmable nuclease in a method of detecting a target nucleic acid. The samples, as described herein, are compatible with any of the compositions comprising a programmable nuclease and a buffer. Described herein are samples that contain deoxyribonucleic acid (DNA), ribonucleic acid (RNA), or both, which can be modified or detected using a programmable nuclease of the present disclosure. As described herein, programmable nucleases are activated upon binding to a target nucleic acid of interest in a sample upon hybridization of a guide nucleic acid to the target nucleic acid. Subsequently, the activated programmable nucleases exhibit sequence-independent cleavage of a nucleic acid in a reporter. The reporter additionally includes a detectable moiety, which is released upon sequence-independent cleavage of the nucleic acid in the reporter. The detectable moiety emits a detectable signal, which can be measured by various methods (e.g., spectrophotometry, fluorescence measurements, electrochemical measurements).

[0268] Various sample types comprising a target nucleic acid of interest are consistent with the present disclosure. These samples can comprise a target nucleic acid sequence for detection. In some embodiments, the detection of the target nucleic indicates an ailment, such as a disease, cancer, or genetic disorder, or genetic information, such as for phenotyping, genotyping, or determining ancestry and are compatible with the reagents and support mediums as described herein. Generally, a sample from an individual or an animal or an environmental sample can be obtained to test for presence of a disease, cancer, genetic disorder, or any mutation of interest. A biological sample from the individual may be blood, serum, plasma, saliva, urine, mucosal sample, peritoneal sample, cerebrospinal fluid, gastric secretions, nasal secretions, sputum, pharyngeal exudates, urethral or vaginal secretions, an exudate, an effusion, or tissue. A tissue sample may be dissociated or liquified prior to application to detection system of the present disclosure. A sample from an environment may be from soil, air, or water. In some instances, the environmental sample is taken as a swab from a surface of interest or taken directly from the surface of interest. In some instances, the raw sample is applied to the detection system. In some instances, the sample is diluted with a buffer or a fluid or concentrated prior to application to the detection system or be applied neat to the detection system. Sometimes, the sample is contained in no more 20 μl. The sample, in some cases, is contained in no more than 1, 5, 10, 15, 20, 25, 30, 35 40, 45, 50, 55, 60, 65, 70, 75, 80, 90, 100, 200, 300, 400, 500 μl, or any of value from 1 μl to 500 μl, preferably from 10 μL to 200 μL, or more preferably from 50 μL to 100 μL. Sometimes, the sample is contained in more than 500 μl.

[0269] In some embodiments, the target nucleic acid is single-stranded DNA. The methods, reagents, enzymes, and kits disclosed herein may enable the direct detection of a DNA encoding a sequence of interest, in particular a single-stranded DNA encoding a sequence of interest, without transcribing the DNA into RNA, for example, by using an RNA polymerase. The compositions and methods disclosed herein may enable the detection of target nucleic acid that is an amplified nucleic acid of a nucleic acid of interest. In some embodiments, the target nucleic acid is a cDNA, genomic DNA, an amplicon of genomic DNA or a DNA amplicon of an RNA. A nucleic acid can encode a sequence from a genomic locus. In some cases, the target nucleic acid that binds to the guide nucleic acid is from 5 to 100, 5 to 90, 5 to 80, 5 to 70, 5 to 60, 5 to 50, 5 to 40, 5 to 30, 5 to 25, 5 to 20, 5 to 15, or 5 to 10 nucleotides in length. The nucleic acid can be from 10 to 90, from 20 to 80, from 30 to 70, or from 40 to 60 nucleotides in length. A nucleic acid can be 5, 6, 7, 8, 9, 10, 11, 12, 13, 14, 15, 16, 17, 18, 19, 20, 21, 22, 23, 24, 25, 26, 27, 28, 29, 30, 31, 32, 33, 34, 35, 36, 37, 38, 39, 40, 45, 50, 60, 70, 80, 90, or 100 nucleotides in length. The target nucleic acid can encode a sequence reverse complementary to a guide nucleic acid sequence.

[0270] In some instances, the sample is taken from single-cell eukaryotic organisms; a plant or a plant cell; an algal cell; a fungal cell; an animal cell, tissue, or organ; a cell, tissue, or organ from an invertebrate animal; a cell, tissue, fluid, or organ from a vertebrate animal such as fish, amphibian, reptile, bird, and mammal; a cell, tissue, fluid, or organ from a mammal such as a human, a non-human primate, an ungulate, a feline, a bovine, an ovine, and a caprine. In some instances, the sample is taken from nematodes, protozoans, helminths, or malarial parasites. In some cases, the sample comprises nucleic acids from a cell lysate from a eukaryotic cell, a mammalian cell, a human cell, a prokaryotic cell, or a plant cell. In some cases, the sample comprises nucleic acids expressed from a cell.

[0271] The sample described herein may comprise at least one target nucleic acid. The target nucleic acid comprises a segment that is reverse complementary to a segment of a guide nucleic acid. Often, the sample comprises the segment of the target nucleic acid and at least one nucleic acid comprising at least 50% sequence identity to a segment of the target nucleic acid. Sometimes, the at least one nucleic acid comprises a segment comprising at least 60%, 70%, 75%, 80%, 85%, 90%, 91%, 92%, 93%, 94%, 95%, 96%, 97%, 98%, or 99% sequence identity to the segment of the target nucleic acid. Often, a sample comprises the segment of the target nucleic acid and at least one nucleic acid a segment comprising less than 100% sequence identity to the target nucleic acid but no less than 50% sequence identity to the segment of the target nucleic acid. Sometimes, a sample comprises the segment of the target nucleic acid and at least one nucleic acid a segment comprising less than 100% sequence identity to the target nucleic acid but no less than 60%, 70%, 75%, 80%, 85%, 90%, 91%, 92%, 93%, 94%, 95%, 96%, 97%, 98%, or 99% sequence identity to the segment of the target nucleic acid. For example, the segment of the target nucleic acid comprises a mutation as compared to at least one nucleic acid comprising a segment comprising less than 100% sequence identity to the segment of the target nucleic acid but no less than 50% sequence identity to the segment of the target nucleic acid. Sometimes, the segment of the target nucleic acid comprises a mutation as compared to at least one nucleic acid comprising a segment comprising less than 100% sequence identity to the segment of the target nucleic acid but no less than 60%, 70%, 75%, 80%, 85%, 90%, 91%, 92%, 93%, 94%, 95%, 96%, 97%, 98%, or 99% sequence identity to the segment of the target nucleic acid. Often, the segment of the target nucleic acid comprises a mutation as compared to at least one nucleic acid comprising a segment comprising less than 100% sequence identity to the segment of the target nucleic acid but no less than 50% sequence identity to the segment of the target nucleic acid. The mutation can be a mutation of 1, 2, 3, 4, 5, 6, 7, 8, 9, 10, 11, 12, 13, 14, 15, 16, 17, 18, 19, 20 or more nucleotides. Often, the mutation is a single nucleotide mutation. The single nucleotide mutation can be a single nucleotide polymorphism (SNP), which is a single base pair variation in a DNA sequence present in less than 1% of a population. Sometimes, the target nucleic acid comprises a single nucleotide mutation, wherein the single nucleotide mutation comprises the wild type variant of the SNP. The single nucleotide mutation or SNP can be associated with a phenotype of the sample or a phenotype of the organism from which the sample was taken. The SNP, in some cases, is associated with altered phenotype from wild type phenotype. Often, the segment of the target nucleic acid sequence comprises a deletion as compared to at least one nucleic acid comprising a segment comprising less than 100% sequence identity to the segment of the target nucleic acid but no less than 50% sequence identity to the segment of the target nucleic acid. The mutation can be a deletion of 1, 2, 3, 4, 5, 6, 7, 8, 9, 10, 11, 12, 13, 14, 15, 16, 17, 18, 19, 20 or more nucleotides. The mutation can be a deletion of about 5, about 10, about 15, about 20, about 25, about 30, about 35, about 40, about 45, about 50, about 55, about 60, about 65, about 70, about 75, about 80, about 85, about 90, about 95, about 100, about 200, about 300, about 400, about 500, about 600, about 700, about 800, about 900, or about 1000 nucleotides. The mutation can be a deletion of from 1 to 5, from 5 to 10, from 10 to 15, from 15 to 20, from 20 to 25, from 25 to 30, from 30 to 35, from 35 to 40, from 40 to 45, from 45 to 50, from 50 to 55, from 55 to 60, from 60 to 65, from 65 to 70, from 70 to 75, from 75 to 80, from 80 to 85, from 85 to 90, from 90 to 95, from 95 to 100, from 100 to 200, from 200 to 300, from 300 to 400, from 400 to 500, from 500 to 600, from 600 to 700, from 700 to 800, from 800 to 900, from 900 to 1000, from 1 to 50, from 1 to 100, from 25 to 50, from 25 to 100, from 50 to 100, from 100 to 500, from 100 to 1000, or from 500 to 1000 nucleotides. The segment of the target nucleic acid that the guide nucleic acid of the methods describe herein binds to comprises the mutation, such as the SNP or the deletion. The mutation can be a single nucleotide mutation or a SNP. The SNP can be a synonymous substitution or a nonsynonymous substitution. The nonsynonymous substitution can be a missense substitution or a nonsense point mutation. The synonymous substitution can be a silent substitution. The mutation can be a deletion of one or more nucleotides. Often, the single nucleotide mutation, SNP, or deletion is associated with a disease such as cancer or a genetic disorder. The mutation, such as a single nucleotide mutation, a SNP, or a deletion, can be encoded in the sequence of a target nucleic acid from the germline of an organism or can be encoded in a target nucleic acid from a diseased cell, such as a cancer cell.

[0272] The sample used for disease testing may comprise at least one target nucleic acid that can bind to a guide nucleic acid of the reagents described herein. The sample used for disease testing may comprise at least nucleic acid of interest that is amplified to produce a target nucleic acid that can bind to a guide nucleic acid of the reagents described herein. The nucleic acid of interest can comprise DNA, RNA, or a combination thereof.

[0273] The target nucleic acid (e.g., a target DNA) may be a portion of a nucleic acid from a virus or a bacterium or other agents responsible for a disease in the sample. The target nucleic acid may be a portion of a nucleic acid from a gene expressed in a cancer or genetic disorder in the sample. In some cases, the sequence is a segment of a target nucleic acid sequence. A segment of a target nucleic acid sequence can be from a genomic locus, a transcribed mRNA, or a reverse transcribed cDNA. A segment of a target nucleic acid sequence can be from 5 to 100, 5 to 90, 5 to 80, 5 to 70, 5 to 60, 5 to 50, 5 to 40, 5 to 30, 5 to 25, 5 to 20, 5 to 15, or 5 to 10 nucleotides in length. A segment of a target nucleic acid sequence can be 5, 6, 7, 8, 9, 10, 11, 12, 13, 14, 15, 16, 17, 18, 19, 20, 21, 22, 23, 24, 25, 26, 27, 28, 29, 30, 31, 32, 33, 34, 35, 36, 37, 38, 39, 40, 45, 50, 60, 70, 80, 90, or 100 nucleotides in length. The sequence of the target nucleic acid segment can be reverse complementary to a segment of a guide nucleic acid sequence. The target nucleic acid may comprise a genetic variation (e.g., a single nucleotide polymorphism), with respect to a standard sample, associated with a disease phenotype or disease predisposition. The target nucleic acid may be an amplicon of a portion of an RNA, may be a DNA, or may be a DNA amplicon from any organism in the sample.

[0274] In some embodiments, the target nucleic acid sequence comprises a nucleic acid sequence of a virus or a bacterium or other agents responsible for a disease in the sample. In some embodiments, the target nucleic acid comprises DNA that is reverse transcribed from RNA using a reverse transcriptase prior to detection by a programmable nuclease using the compositions, systems, and methods disclosed herein. The target nucleic acid, in some cases, is a portion of a nucleic acid from a sexually transmitted infection or a contagious disease, in the sample. In some cases, the target nucleic acid is a portion of a nucleic acid from a genomic locus, or any DNA amplicon, such as a reverse transcribed mRNA or a cDNA from a gene locus, a transcribed mRNA, or a reverse transcribed cDNA from a gene locus in at least one of: human immunodeficiency virus (HIV), human papillomavirus (HPV), chlamydia, gonorrhea, syphilis, trichomoniasis, sexually transmitted infection, malaria, Dengue fever, Ebola, chikungunya, and leishmaniasis. Pathogens include viruses, fungi, helminths, protozoa, malarial parasites, Plasmodium parasites, Toxoplasma parasites, and Schistosoma parasites. Helminths include roundworms, heartworms, and phytophagous nematodes, flukes, Acanthocephala, and tapeworms. Protozoan infections include infections from Giardia spp., Trichomonas spp., African trypanosomiasis, amoebic dysentery, babesiosis, balantidial dysentery, Chaga's disease, coccidiosis, malaria and toxoplasmosis. Examples of pathogens such as parasitic/protozoan pathogens include, but are not limited to: Plasmodium falciparum, P. vivax, Trypanosoma cruzi and Toxoplasma gondii. Fungal pathogens include, but are not limited to Cryptococcus neoformans, Histoplasma capsulatum, Coccidioides immitis, Blastomyces dermatitidis, Chlamydia trachomatis, and Candida albicans. Pathogenic viruses include but are not limited to coronavirus; immunodeficiency virus (e.g., HIV); influenza virus; dengue; West Nile virus; herpes virus; yellow fever virus; Hepatitis Virus C; Hepatitis Virus A; Hepatitis Virus B; papillomavirus; and the like. Pathogens include, e.g., HIV virus, Mycobacterium tuberculosis, Streptococcus agalactiae, methicillin-resistant Staphylococcus aureus, Legionella pneumophila, Streptococcus pyogenes, Escherichia coli, Neisseria gonorrhoeae, Neisseria meningitidis, Pneumococcus, Cryptococcus neoformans, Histoplasma capsulatum, Hemophilus influenzae B, Treponema pallidum, Lyme disease spirochetes, Pseudomonas aeruginosa, Mycobacterium leprae, Brucella abortus, rabies virus, influenza virus, cytomegalovirus, herpes simplex virus I, herpes simplex virus II, human serum parvo-like virus, respiratory syncytial virus (RSV), M. genitalium, T. vaginalis, varicella-zoster virus, hepatitis B virus, hepatitis C virus, measles virus, adenovirus, human T-cell leukemia viruses, Epstein-Barr virus, murine leukemia virus, mumps virus, vesicular stomatitis virus, Sindbis virus, lymphocytic choriomeningitis virus, wart virus, blue tongue virus, Sendai virus, feline leukemia virus, Reovirus, polio virus, simian virus 40, mouse mammary tumor virus, dengue virus, rubella virus, West Nile virus, Plasmodium falciparum, Plasmodium vivax, Toxoplasma gondii, Trypanosoma rangeli, Trypanosoma cruzi, Trypanosoma rhodesiense, Trypanosoma brucei, Schistosoma mansoni, Schistosoma japonicum, Babesia bovis, Eimeria tenella, Onchocerca volvulus, Leishmania tropica, Mycobacterium tuberculosis, Trichinella spiralis, Theileria parva, Taenia hydatigena, Taenia ovis, Taenia saginata, Echinococcus granulosus, Mesocestoides corti, Mycoplasma arthritidis, M. hyorhinis, M. orale, M. arginini, Acholeplasma laidlawii, M. salivarium and M. pneumoniae. In some cases, the target sequence is a portion of a nucleic acid from a genomic locus, a transcribed mRNA, or a reverse transcribed cDNA from a gene locus of bacterium or other agents responsible for a disease in the sample comprising a mutation that confers resistance to a treatment, such as a single nucleotide mutation that confers resistance to antibiotic treatment. In some cases, the mutation that confers resistance to a treatment is a deletion.

[0275] Compositions and methods of the disclosure can be used for cell line engineering (e.g., engineering a cell from a cell line for bioproduction). For example, compositions and methods of the disclosure can be used to express a desired protein from a cell line. In some embodiments, the target nucleic acid sequence comprises a nucleic acid sequence of a cell line. In some embodiments, the target nucleic acid sequence comprises a genomic nucleic acid sequence of a cell line. In some embodiments, the cell line is a Chinese hamster ovary cell line (CHO), human embryonic kidney cell line (HEK), cell lines derived from cancer cells, cell lines derived from lymphocytes, and the like. Non-limiting examples of cell lines includes: C8161, CCRF-CEM, MOLT, mIMCD-3, NHDF, HeLa-S3, Huh1, Huh4, Huh7, HUVEC, HASMC, HEKn, HEKa, MiaPaCell, Panc1, PC-3, TF1, CTLL-2, CIR, Rat6, CVI, RPTE, A10, T24, J82, A375, ARH-77, Calu1, SW480, SW620, SKOV3, SK-UT, CaCo2, P388D1, SEM-K2, WEHI-231, HB56, TIB55, Jurkat, J45.01, LRMB, Bcl-1, BC-3, IC21, DLD2, Raw264.7, NRK, NRK-52E, MRC5, MEF, Hep G2, HeLa B, HeLa T4, COS, COS-1, COS-6, COS-M6A, BS-C-1 monkey kidney epithelial, BALB/3T3 mouse embryo fibroblast, 3T3 Swiss, 3T3-L1, 132-d5 human fetal fibroblasts; 10.1 mouse fibroblasts, 293-T, 3T3, 721, 9L, A2780, A2780ADR, A2780cis, A172, A20, A253, A431, A-549, ALC, AsPC-1, B16, B35, BCP-1 cells, BEAS-2B, bEnd.3, BHK-21, BR 293, BxPC3, C3H-10T1/2, C6/36, Cal-27, Capan-1, CHO, CHO-7, CHO-IR, CHO-K1, CHO-K2, CHO-S, CHO-T, CHO Dhfr−/−, COR-L23, COR-L23/CPR, COR-L23/5010, COR-L23/R23, COS-7, COV-434, CML T1, CMT, CT26, D17, DH82, DU145, DuCaP, EL4, EM2, EM3, EMT6/AR1, EMT6/AR10.0, FM3, H1299, H69, HAP1, HB54, HB55, HCA2, HEK-293, HeLa, Hepa1-6, Hep3B, Hepa1c1c7, HL-60, HMEC, HT-29, Jurkat, JY cells, K562 cells, Ku812, KCL22, KG1, KYO1, LNCap, Ma-Mel 1-48, MC-38, MCF-7, MCF-10A, MDA-MB-231, MDA-MB-468, MDA-MB-435, MDCK II, MDCK II, MOR/0.2R, MONO-MAC 6, MTD-1A, MyEnd, NCI-H69/CPR, NCI-H69/LX10, NCI-H69/LX20, NCI-H69/LX4, NIH-3T3, NALM-1, Neuro2A, NK92, NW-145, OPCN/OPCT cell lines, Peer, PNT-1A/PNT 2, RenCa, RIN-5F, RMA/RMAS, Saos-2 cells, Sf-9, SkBr3, T2, T-47D, T84, THP1 cell line, U373, U87, U937, VCaP, Vero cells, WM39, WT-49, X63, YAC-1, and YAR. Non-limiting examples of other cells that can be used with the disclosure include immune cells, such as CART, T-cells, B-cells, NK cells (including iNK cells), granulocytes, basophils, eosinophils, neutrophils, mast cells, monocytes, macrophages, dendritic cells, antigen-presenting cells (APC), or adaptive cells. Non-limiting examples of cells that can be used with this disclosure also include plant cells, such as parenchyma, sclerenchyma, collenchyma, xylem, phloem, germline (e.g., pollen). Cells may be from lycophytes, ferns, gymnosperms, angiosperms, bryophytes, charophytes, chloropytes, rhodophytes, or glaucophytes. Cells may be obtained from non-human animals, including, but not limited to, rats, dogs, rabbits, cats, and monkeys. Non-limiting examples of cells that can be used with this disclosure also include stem cells, such as human stem cells, animal stem cells, stem cells that are not derived from human embryonic stem cells, embryonic stem cells, mesenchymal stem cells, pluripotent stem cells, induced pluripotent stem cells (iPS), somatic stem cells, adult stem cells, hematopoietic stem cells, tissue-specific stem cells. Non-limiting examples of cells that can be used with this disclosure also include neuronal cells from various organs of an animal, e.g., brain, heart, lung, liver, pancreas, and muscle. In preferred embodiments, the cells that can be used with the disclosure are T cells, such as CAR-T (CART) cells.

[0276] CHO cells are an epithelial cell line which is particularly useful in biological and medical research. In particular, CHO cells are frequently used for the industrial production of recombinant therapeutics. In some embodiments, a CasΦ polypeptide disclosed herein is expressed in a CHO cell. In some embodiments, a CasΦ polypeptide disclosed herein complexed with a guide nucleic is expressed in a CHO cell. In some embodiments, a method disclosed herein comprises modifying or editing a CHO cell. In some embodiments, a modified CHO cell is provided wherein the CHO cell is modified by a CasΦ polypeptide disclosed herein. In some embodiments, a CHO cell is provided wherein the CHO cell comprises a CasΦ polypeptide disclosed herein.

[0277] T cells are important therapeutic targets. In some embodiments, a CasΦ polypeptide disclosed herein is expressed in a T cell. In some embodiments, a CasΦ polypeptide disclosed herein complexed with a guide nucleic is expressed in a T cell. In some embodiments, a method disclosed herein comprises modifying or editing a T cell. In some embodiments, a method disclosed herein comprises modifying a PDCD1 gene of a T cell. In some embodiments, a method disclosed herein comprises modifying a TRAC gene of a T cell. In some embodiments, a method disclosed herein comprises modifying a B2M gene of a T cell. In some embodiments, a method disclosed herein comprises modifying a PDCD1 gene of a T cell, a TRAC gene of a T cell, a B2M gene of a T cell or a combination thereof. In some embodiments, a method disclosed herein comprises modifying a PDCD1 gene, a TRAC gene, and a B2M gene of a T cell. In some embodiments, a modified T cell is provided wherein the T cell is modified by a CasΦ polypeptide disclosed herein. In some embodiments, a T cell is provided wherein the T cell comprises a CasΦ polypeptide disclosed herein.

[0278] T cells, also known as T lymphocytes, are easily identifiable by the surface expression of the T-cell receptor (TCR). In some embodiments, the T cells include one or more subsets of T cells, such as CD4+ cells, CD8+ cells, and sub-populations thereof. In some embodiments, a T cell is a CD4+ cell. In some embodiments, a T cell is a CD8+ T cells. In some embodiments, a population of T cells comprises CD4+ T cells and CD8+ T cells. In some embodiments, T cells comprise TCR-T, Tscm, or iT cells.

[0279] Sub-populations of CD4+ and CD8+ T cells include naive T cells, effector T cells, memory T cells, immature T cells, mature T cells, helper T cells, cytotoxic T cells, regulatory T cells, alpha/beta T cells, and delta/gamma T cells. Sub-types of memory T cells include stem cell memory T cells, central memory T cells, effector memory T cells, and terminally differentiated effector memory T cells. Sub-types of helper T cells, include T helper 1 cells, T helper 2 cells, T helper 3 cells, T helper 17 cells, T helper 9 cells, T helper 22 cells, and follicular helper T cells. In some embodiments, the cell is a regulatory T cell (Treg).

[0280] CART cells are T cells that have been genetically engineered to express unique chimeric antigen receptors (CARs) targeting specific antigens. CART cells are important targets for immunotherapy. In some embodiments, a CasΦ polypeptide disclosed herein is expressed in a CART cell. In some embodiments, a CasΦ polypeptide disclosed herein complexed with a guide nucleic is expressed in a CART cell. In some embodiments, a method disclosed herein comprises modifying or editing a CART cell. In some embodiments, a modified CART cell is provided wherein the CART cell is modified by a CasΦ polypeptide disclosed herein. In some embodiments, a CART cell is provided wherein the CART cell comprises a CasΦ polypeptide disclosed herein.

[0281] Modified stem cells and methods of modifying stem cells are also provided. In some embodiments, a CasΦ polypeptide disclosed herein is expressed in a stem cell. In some embodiments, a CasΦ polypeptide disclosed herein complexed with a guide nucleic is expressed in a stem cell. In some embodiments, a method disclosed herein comprises modifying or editing a stem cell. In some embodiments, a modified stem cell is provided wherein a stem cell is modified by a CasΦ polypeptide disclosed herein. In some embodiments, a stem cell is provided wherein the stem cell comprises a CasΦ polypeptide disclosed herein. In some embodiments, a modified stem cell is obtained or is obtainable by a method disclosed herein. In some embodiments, a modified stem cell is provided wherein the CART cell is modified by a CasΦ polypeptide disclosed herein.

[0282] Induced pluripotent stem cells (iPSCs) are pluripotent stem cells that are generated from somatic cells. They can propagate indefinitely and give rise to any cell type in the body. These features make iPSCs a powerful tool for researching human disease and provide a promising prospect for cell therapies for a range of medical conditions. iPSCs can be generated in a patient-specific manner and used in autologous transplant, thereby overcoming complications of rejection by the host immune system (Moradi et al. (2019), Stem Cell Research & Therapy).

[0283] In some embodiments, a CasΦ polypeptide disclosed herein is expressed in an induced pluripotent stem cell. In some embodiments, a CasΦ polypeptide disclosed herein complexed with a guide nucleic is expressed in an induced pluripotent stem cell. In some embodiments, a method disclosed herein comprises modifying or editing an induced pluripotent stem cell. In some embodiments, a modified induced pluripotent stem cell is provided wherein an induced pluripotent stem cell is modified by a CasΦ polypeptide disclosed herein. In some embodiments, an induced pluripotent stem cell is provided wherein the induced pluripotent stem cell comprises a CasΦ polypeptide disclosed herein. In some embodiments, a modified induced pluripotent cell is obtained or is obtainable by a method disclosed herein.

[0284] Hematopoietic stem cells (HSCs) are identifiable by the marker CD34. HSCs are stem cells that differentiate to give rise blood cells, such as T and B lymphocytes, erythrocytes, monocytes and macrophages. HSCs are important cells for future stem cell therapies as they have the potential to be used to treat genetic blood cell diseases (Morgan et al. (2017), Cell Stem Cell).

[0285] In some embodiments, a CasΦ polypeptide disclosed herein is expressed in a hematopoietic stem cell. In some embodiments, a CasΦ polypeptide disclosed herein complexed with a guide nucleic is expressed in a hematopoietic stem cell. In some embodiments, a method disclosed herein comprises modifying or editing a hematopoietic stem cell. In some embodiments, a modified hematopoietic stem cell is provided wherein a hematopoietic stem cell is modified by a CasΦ polypeptide disclosed herein. In some embodiments, a hematopoietic stem cell is provided wherein the hematopoietic stem cell comprises a CasΦ polypeptide disclosed herein. In some embodiments, a modified hematopoietic stem cell is obtained or is obtainable by a method disclosed herein.

[0286] Compositions and methods of the disclosure can be used for agricultural engineering. For example, compositions and methods of the disclosure can be used to confer desired traits on a plant. A plant can be engineered for the desired physiological and agronomic characteristic using the present disclosure. In some embodiments, the target nucleic acid sequence comprises a nucleic acid sequence of a plant. In some embodiments, the target nucleic acid sequence comprises a genomic nucleic acid sequence of a plant cell. In some embodiments, the target nucleic acid sequence comprises a nucleic acid sequence of an organelle of a plant cell. In some embodiments, the target nucleic acid sequence comprises a nucleic acid sequence of a chloroplast of a plant cell.

[0287] The plant can be a monocotyledonous plant. The plant can be a dicotyledonous plant. Non-limiting examples of orders of dicotyledonous plants include Magniolales, Illiciales, Laurales, Piperales, Aristochiales, Nymphaeales, Ranunculales, Papeverales, Sarraceniaceae, Trochodendrales, Hamamelidales, Eucomiales, Leitneriales, Myricales, Fagales, Casuarinales, Caryophyllales, Batales, Polygonales, Plumbaginales, Dilleniales, Theales, Malvales, Urticales, Lecythidales, Violales, Salicales, Capparales, Ericales, Diapensales, Ebenales, Primulales, Rosales, Fabales, Podostemales, Haloragales, Myrtales, Cornales, Proteales, San tales, Rafflesiales, Celastrales, Euphorbiales, Rhamnales, Sapindales, Juglandales, Geraniales, Polygalales, Umbellales, Gentianales, Polemoniales, Lamiales, Plantaginales, Scrophulariales, Campanulales, Rubiales, Dipsacales, and Asterales.

[0288] Non-limiting examples of orders of monocotyledonous plants include Alismatales, Hydrocharitales, Najadales, Triuridales, Commelinales, Eriocaulales, Restionales, Poales, Juncales, Cyperales, Typhales, Bromeliales, Zingiberales, Arecales, Cyclanthales, Pandanales, Arales, Lilliales, and Orchid ales. A plant can belong to the order, for example, Gymnospermae, Pinales, Ginkgoales, Cycadales, Araucariales, Cupressales and Gnetales.

[0289] Non-limiting examples of plants include plant crops, fruits, vegetables, grains, soy bean, corn, maize, wheat, seeds, tomatoes, rice, cassava, sugarcane, pumpkin, hay, potatoes, cotton, cannabis, tobacco, flowering plants, conifers, gymnosperms, ferns, clubmosses, hornworts, liverworts, mosses, wheat, maize, rice, millet, barley, tomato, apple, pear, strawberry, orange, acacia, carrot, potato, sugar beets, yam, lettuce, spinach, sunflower, rape seed, Arabidopsis, alfalfa, amaranth, apple, apricot, artichoke, ash tree, asparagus, avocado, banana, barley, beans, beet, birch, beech, blackberry, blueberry, broccoli, Brussel's sprouts, cabbage, canola, cantaloupe, carrot, cassava, cauliflower, cedar, a cereal, celery, chestnut, cherry, Chinese cabbage, citrus, clementine, clover, coffee, corn, cotton, cowpea, cucumber, cypress, eggplant, elm, endive, eucalyptus, fennel, figs, fir, geranium, grape, grapefruit, groundnuts, ground cherry, gum hemlock, hickory, kale, kiwifruit, kohlrabi, larch, lettuce, leek, lemon, lime, locust, pine, maidenhair, maize, mango, maple, melon, millet, mushroom, mustard, nuts, oak, oats, oil palm, okra, onion, orange, an ornamental plant or flower or tree, papaya, palm, parsley, parsnip, pea, peach, peanut, pear, peat, pepper, persimmon, pigeon pea, pine, pineapple, plantain, plum, pomegranate, potato, pumpkin, radicchio, radish, rapeseed, raspberry, rice, rye, sorghum, safflower, sallow, soybean, spinach, spruce, squash, strawberry, sugar beet, sugarcane, sunflower, sweet potato, sweet corn, tangerine, tea, tobacco, tomato, trees, triticale, turf grasses, turnips, vine, walnut, watercress, watermelon, wheat, yams, yew, and zucchini. A plant can include algae.

[0290] In some embodiments, the target nucleic acid sequence comprises a nucleic acid sequence of a virus, a bacterium, or other pathogen responsible for a disease in a plant (e.g., a crop). Methods and compositions of the disclosure can be used to treat or detect a disease in a plant. For example, the methods of the disclosure can be used to target a viral nucleic acid sequence in a plant. A programmable nuclease of the disclosure (e.g., CasΦ) can cleave the viral nucleic acid. In some embodiments, the target nucleic acid sequence comprises a nucleic acid sequence of a virus or a bacterium or other agents (e.g., any pathogen) responsible for a disease in the plant (e.g., a crop). In some embodiments, the target nucleic acid comprises DNA that is reverse transcribed from RNA using a reverse transcriptase prior to detection by a programmable nuclease using the compositions, systems, and methods disclosed herein. The target nucleic acid, in some cases, is a portion of a nucleic acid from a virus or a bacterium or other agents responsible for a disease in the plant (e.g., a crop). In some cases, the target nucleic acid is a portion of a nucleic acid from a genomic locus, or any DNA amplicon, such as a reverse transcribed mRNA or a cDNA from a gene locus, a transcribed mRNA, or a reverse transcribed cDNA from a gene locus in at a virus or a bacterium or other agents (e.g., any pathogen) responsible for a disease in the plant (e.g., a crop). A virus infecting the plant can be an RNA virus. A virus infecting the plant can be a DNA virus. Non-limiting examples of viruses that can be targeted with the disclosure include Tobacco mosaic virus (TMV), Tomato spotted wilt virus (TSWV), Cucumber mosaic virus (CMV), Potato virus Y (PVY), Cauliflower mosaic virus (CaMV) (RT virus), Plum pox virus (PPV), Brome mosaic virus (BMV) and Potato virus X (PVX).

[0291] The sample used for cancer testing may comprise at least one target nucleic acid that can bind to a guide nucleic acid of the reagents described herein. The target nucleic acid, in some cases, comprises a portion of a gene comprising a mutation associated with cancer, a gene whose overexpression is associated with cancer, a tumor suppressor gene, an oncogene, a checkpoint inhibitor gene, a gene associated with cellular growth, a gene associated with cellular metabolism, or a gene associated with cell cycle. Sometimes, the target nucleic acid encodes a cancer biomarker, such as a prostate cancer biomarker or non-small cell lung cancer. In some cases, the assay can be used to detect “hotspots” in target nucleic acids that can be predictive of lung cancer. In some cases, the target nucleic acid comprises a portion of a nucleic acid that is associated with a blood fever. In some cases, the target nucleic acid is a portion of a nucleic acid from a genomic locus, any DNA amplicon of, a reverse transcribed mRNA, or a cDNA from a locus of at least one of: ALK, APC, ATM, AXIN2, BAP1, BARD1, BLM, BMPR1A, BRCA1, BRCA2, BRIP1, CASR, CDC73, CDH1, CDK4, CDKN1B, CDKN1C, CDKN2A, CEBPA, CHEK2, CTNNA1, DICER1, DIS3L2, EGFR, EPCAM, FH, FLCN, GATA2, GPC3, GREM1, HOXB13, HRAS, KIT, MAX, MEN1, MET, MITF, MLH1, MSH2, MSH3, MSH6, MUTYH, NBN, NF1, NF2, NTHL1, PALB2, PDGFRA, PHOX2B, PMS2, POLD1, POLE, POT1, PRKAR1A, PTCH1, PTEN, RAD50, RAD51C, RAD51D, RB1, RECQL4, RET, RUNX1, SDHA, SDHAF2, SDHB, SDHC, SDHD, SMAD4, SMARCA4, SMARCB1, SMARCE1, STK11, SUFU, TERC, TERT, TMEM127, TP53, TSC1, TSC2, VHL, WRN, and WT1. Any region of the aforementioned gene loci can be probed for a mutation or deletion using the compositions and methods disclosed herein. For example, in the EGFR gene locus, the compositions and methods for detection disclosed herein can be used to detect a single nucleotide polymorphism or a deletion. The SNP or deletion can occur in a non-coding region or a coding region. The SNP or deletion can occur in an Exon, such as Exon 19. A SNP, deletion, or other mutation may mediate gene knockout.

[0292] The sample used for genetic disorder testing may comprise at least one target nucleic acid that can bind to a guide nucleic acid of the reagents described herein. In some embodiments, the genetic disorder is hemophilia, sickle cell anemia, β-thalassemia, Duchene muscular dystrophy, severe combined immunodeficiency, Huntington's disease, or cystic fibrosis. The target nucleic acid, in some cases, is from a gene with a mutation associated with a genetic disorder, from a gene whose overexpression is associated with a genetic disorder, from a gene associated with abnormal cellular growth resulting in a genetic disorder, or from a gene associated with abnormal cellular metabolism resulting in a genetic disorder. In some cases, the target nucleic acid is a nucleic acid from a genomic locus, a transcribed mRNA, or a reverse transcribed mRNA, a DNA amplicon of or a cDNA from a locus of at least one of: CFTR, FMR1, SMN1, ABCB11, ABCC8, ABCD1, ACAD9, ACADM, ACADVL, ACAT1, ACOX1, ACSF3, ADA, ADAMTS2, ADGRG1, AGA, AGL, AGPS, AGXT, AIRE, ALDH3A2, ALDOB, ALG6, ALMS1, ALPL, AMT, AQP2, ARG1, ARSA, ARSB, ASL, ASNS, ASPA, ASS1, ATM, ATP6VIB1, ATP7A, ATP7B, ATRX, BBS1, BBS10, BBS12, BBS2, BCKDHA, BCKDHB, BCS1L, BLM, BSND, CAPN3, CBS, CDH23, CEP290, CERKL, CHM, CHRNE, CIITA, CLN3, CLN5, CLN6, CLN8, CLRN1, CNGB3, COL27A1, COL4A3, COL4A4, COL4A5, COL7A1, CPS1, CPT1A, CPT2, CRB1, CTNS, CTSK, CYBA, CYBB, CYP11B1, CYP11B2, CYP17A1, CYP19A1, CYP27A1, DBT, DCLRE1C, DHCR7, DHDDS, DLD, DMD, DNAH5, DNAI1, DNAI2, DYSF, EDA, EIF2B5, EMD, ERCC6, ERCC8, ESCO2, ETFA, ETFDH, ETHE1, EVC, EVC2, EYS, F9, FAH, FAM161A, FANCA, FANCC, FANCG, FH, FKRP, FKTN, G6PC, GAA, GALC, GALK1, GALT, GAMT, GBA, GBE1, GCDH, GFM1, GJB1, GJB2, GLA, GLB1, GLDC, GLE1, GNE, GNPTAB, GNPTG, GNS, GRHPR, HADHA, HAX1, HBA1, HBA2, HBB, HEXA, HEXB, HGSNAT, HLCS, HMGCL, HOGA1, HPS1, HPS3, HSD17B4, HSD3B2, HYAL1, HYLS1, IDS, IDUA, IKBKAP, IL2RG, IVD, KCNJ11, LAMA2, LAMA3, LAMB3, LAMC2, LCA5, LDLR, LDLRAP1, LHX3, LIFR, LIPA, LOXHD1, LPL, LRPPRC, MAN2B1, MCOLN1, MED17, MESP2, MFSD8, MKS1, MLC1, MMAA, MMAB, MMACHC, MMADHC, MPI, MPL, MPV17, MTHFR, MTM1, MTRR, MTTP, MUT, MYO7A, NAGLU, NAGS, NBN, NDRG1, NDUFAF5, NDUFS6, NEB, NPC1, NPC2, NPHS1, NPHS2, NR2E3, NTRK1, OAT, OPA3, OTC, PAH, PC, PCCA, PCCB, PCDH15, PDHA1, PDHB, PEX1, PEX10, PEX12, PEX2, PEX6, PEX7, PFKM, PHGDH, PKHD1, PMM2, POMGNT1, PPT1, PROP1, PRPS1, PSAP, PTS, PUS1, PYGM, RAB23, RAG2, RAPSN, RARS2, RDH12, RMRP, RPE65, RPGRIP1L, RS1, RTEL1, SACS, SAMHD1, SEPSECS, SGCA, SGCB, SGCG, SGSH, SLC12A3, SLC12A6, SLC17A5, SLC22A5, SLC25A13, SLC25A15, SLC26A2, SLC26A4, SLC35A3, SLC37A4, SLC39A4, SLC4A11, SLC6A8, SLC7A7, SMARCAL1, SMPD1, STAR, SUMF1, TAT, TCIRG1, TECPR2, TFR2, TGM1, TH, TMEM216, TPP1, TRMU, TSFM, TTPA, TYMP, USH1C, USH2A, VPS13A, VPS13B, VPS45, VRK1, VSX2, WNT10A, XPA, XPC, and ZFYVE26.

[0293] The sample used for phenotyping testing may comprise at least one target nucleic acid that can bind to a guide nucleic acid of the reagents described herein. The target nucleic acid, in some cases, is a nucleic acid encoding a sequence associated with a phenotypic trait.

[0294] The sample used for genotyping testing may comprise at least one target nucleic acid that can bind to a guide nucleic acid of the reagents described herein. The target nucleic acid, in some cases, is a nucleic acid encoding a sequence associated with a genotype of interest.

[0295] The sample used for ancestral testing may comprise at least one target nucleic acid that can bind to a guide nucleic acid of the reagents described herein. The target nucleic acid, in some cases, is a nucleic acid encoding a sequence associated with a geographic region of origin or ethnic group.

[0296] The sample can be used for identifying a disease status. For example, a sample is any sample described herein, and is obtained from a subject for use in identifying a disease status of a subject. The disease can be a cancer or genetic disorder. Sometimes, a method comprises obtaining a serum sample from a subject; and identifying a disease status of the subject. Often, the disease status is prostate disease status, but the status of any disease can be assessed.

[0297] In some instances, the target nucleic acid is a single stranded nucleic acid. Alternatively, or in combination, the target nucleic acid is a double stranded nucleic acid and is prepared into single stranded nucleic acids before or upon contacting the reagents. The target nucleic acid may be a reverse transcribed RNA, DNA, DNA amplicon, synthetic nucleic acids, or nucleic acids found in biological or environmental samples. The target nucleic acids include but are not limited to mRNA, rRNA, tRNA, non-coding RNA, long non-coding RNA, and microRNA (miRNA). In some cases, the target nucleic acid is single-stranded DNA (ssDNA) or mRNA. In some cases, the target nucleic acid is from a virus, a parasite, or a bacterium described herein. In some cases, the target nucleic acid is transcribed from a gene as described herein and then reverse transcribed into a DNA amplicon. In some cases, miRNA is extracted using a mirVANA kit. In some cases, RNA may be treated with shrimp alkaline phosphatase to remove phosphates from the 5′ and 3′ ends of an RNA for analysis. RNA analysis may further comprise the use of a thermocycler, SR Adaptors for Illumina, ligation enzymes, reverse transcriptase, and suitable primers for polymerase chain reaction.

[0298] A number of target nucleic acids are consistent with the methods and compositions disclosed herein. Some methods described herein can detect a target nucleic acid present in the sample in various concentrations or amounts as a target nucleic acid population. In some cases, the sample has at least 2 target nucleic acids. In some cases, the sample has at least 3, 5, 10, 20, 30, 40, 50, 100, 200, 300, 400, 500, 600, 700, 800, 900, 1000, 2000, 3000, 4000, 5000, 6000, 7000, 8000, 9000, or 10000 target nucleic acids. In some cases, the sample as from 1 to 10,000, from 100 to 8000, from 400 to 6000, from 500 to 5000, from 1000 to 4000, or from 2000 to 3000 target nucleic acids. In some cases, the method detects target nucleic acid present at least at one copy per 10 non-target nucleic acids, 10² non-target nucleic acids, 10³ non-target nucleic acids, 10⁴ non-target nucleic acids, 10⁵ non-target nucleic acids, 10⁶ non-target nucleic acids, 10⁷ non-target nucleic acids, 10⁸ non-target nucleic acids, 10⁹ non-target nucleic acids, or 10¹⁰ non-target nucleic acids. Often, the target nucleic acid can be from 0.05% to 20% of total nucleic acids in the sample. Sometimes, the target nucleic acid is from 0.1% to 10% of the total nucleic acids in the sample. The target nucleic acid, in some cases, is from 0.1% to 5% of the total nucleic acids in the sample. The target nucleic acid can also be from 0.1% to 1% of the total nucleic acids in the sample. The target nucleic acid can be DNA or RNA. The target nucleic acid can be any amount less than 100% of the total nucleic acids in the sample. The target nucleic acid can be 100% of the total nucleic acids in the sample.

[0299] In some embodiments, the sample comprises a target nucleic acid at a concentration of less than 1 nM, less than 2 nM, less than 3 nM, less than 4 nM, less than 5 nM, less than 6 nM, less than 7 nM, less than 8 nM, less than 9 nM, less than 10 nM, less than 20 nM, less than 30 nM, less than 40 nM, less than 50 nM, less than 60 nM, less than 70 nM, less than 80 nM, less than 90 nM, less than 100 nM, less than 200 nM, less than 300 nM, less than 400 nM, less than 500 nM, less than 600 nM, less than 700 nM, less than 800 nM, less than 900 nM, less than 1 μM, less than 2 μM, less than 3 μM, less than 4 μM, less than 5 μM, less than 6 μM, less than 7 μM, less than 8 μM, less than 9 μM, less than 10 μM, less than 100 μM, or less than 1 mM. In some embodiments, the sample comprises a target nucleic acid sequence at a concentration of from 1 nM to 2 nM, from 2 nM to 3 nM, from 3 nM to 4 nM, from 4 nM to 5 nM, from 5 nM to 6 nM, from 6 nM to 7 nM, from 7 nM to 8 nM, from 8 nM to 9 nM, from 9 nM to 10 nM, from 10 nM to 20 nM, from 20 nM to 30 nM, from 30 nM to 40 nM, from 40 nM to 50 nM, from 50 nM to 60 nM, from 60 nM to 70 nM, from 70 nM to 80 nM, from 80 nM to 90 nM, from 90 nM to 100 nM, from 100 nM to 200 nM, from 200 nM to 300 nM, from 300 nM to 400 nM, from 400 nM to 500 nM, from 500 nM to 600 nM, from 600 nM to 700 nM, from 700 nM to 800 nM, from 800 nM to 900 nM, from 900 nM to 1 μM, from 1 μM to 2 μM, from 2 μM to 3 μM, from 3 μM to 4 μM, from 4 μM to 5 μM, from 5 μM to 6 μM, from 6 μM to 7 μM, from 7 μM to 8 μM, from 8 μM to 9 μM, from 9 μM to 10 μM, from 10 μM to 100 μM, from 100 μM to 1 mM, from 1 nM to 10 nM, from 1 nM to 100 nM, from 1 nM to 1 μM, from 1 nM to 1 μM, from 1 nM to 100 μM, from 1 nM to 1 mM, from 10 nM to 100 nM, from 10 nM to 1 μM, from 10 nM to 10 μM, from 10 nM to 100 μM, from 10 nM to 1 mM, from 100 nM to 1 μM, from 100 nM to 10 μM, from 100 nM to 100 μM, from 100 nM to 1 mM, from 1 μM to 10 μM, from 1 μM to 100 μM, from 1 μM to 1 mM, from 10 μM to 100 μM, from 10 μM to 1 mM, or from 100 μM to 1 mM. In some embodiments, the sample comprises a target nucleic acid at a concentration of from 20 nM to 200 μM, from 50 nM to 100 μM, from 200 nM to 50 μM, from 500 nM to 20 μM, or from 2 μM to 10 μM. In some embodiments, the target nucleic acid is not present in the sample.

[0300] In some embodiments, the sample comprises fewer than 10 copies, fewer than 100 copies, fewer than 1000 copies, fewer than 10,000 copies, fewer than 100,000 copies, or fewer than 1,000,000 copies of a target nucleic acid sequence. In some embodiments, the sample comprises from 10 copies to 100 copies, from 100 copies to 1000 copies, from 1000 copies to 10,000 copies, from 10,000 copies to 100,000 copies, from 100,000 copies to 1,000,000 copies, from 10 copies to 1000 copies, from 10 copies to 10,000 copies, from 10 copies to 100,000 copies, from 10 copies to 1,000,000 copies, from 100 copies to 10,000 copies, from 100 copies to 100,000 copies, from 100 copies to 1,000,000 copies, from 1,000 copies to 100,000 copies, or from 1,000 copies to 1,000,000 copies of a target nucleic acid sequence. In some embodiments, the sample comprises from 10 copies to 500,000 copies, from 200 copies to 200,000 copies, from 500 copies to 100,000 copies, from 1000 copies to 50,000 copies, from 2000 copies to 20,000 copies, from 3000 copies to 10,000 copies, or from 4000 copies to 8000 copies. In some embodiments, the target nucleic acid is not present in the sample.

[0301] A number of target nucleic acid populations are consistent with the methods and compositions disclosed herein. Some methods described herein can detect two or more target nucleic acid populations present in the sample in various concentrations or amounts. In some cases, the sample has at least 2 target nucleic acid populations. In some cases, the sample has at least 3, 4, 5, 6, 7, 8, 9, 10, 20, 30, 40, or 50 target nucleic acid populations. In some cases, the sample has from 3 to 50, from 5 to 40, or from 10 to 25 target nucleic acid populations. In some cases, the method detects target nucleic acid populations that are present at least at one copy per 10¹ non-target nucleic acids, 10² non-target nucleic acids, 10³ non-target nucleic acids, 10⁴ non-target nucleic acids, 10⁵ non-target nucleic acids, 10⁶ non-target nucleic acids, 10⁷ non-target nucleic acids, 10⁸ non-target nucleic acids, 10⁹ non-target nucleic acids, or 10¹⁰ non-target nucleic acids. The target nucleic acid populations can be present at different concentrations or amounts in the sample.

[0302] In some embodiments, the target nucleic acid as disclosed herein can activate the programmable nuclease to initiate sequence-independent cleavage of a nucleic acid-based reporter (e.g., a reporter comprising a DNA sequence, a reporter comprising an RNA sequence, or a reporter comprising DNA and RNA). For example, a programmable nuclease of the present disclosure is activated by a target DNA to cleave reporters having an RNA (also referred to herein as an “RNA reporter”). Alternatively, a programmable nuclease of the present disclosure is activated by a target RNA to cleave reporters having an RNA. Alternatively, a programmable nuclease of the present disclosure is activated by a target DNA to cleave reporters having a DNA (also referred to herein as a “DNA reporter”). The RNA reporter can comprise a single-stranded RNA labelled with a detection moiety or can be any RNA reporter as disclosed herein. The DNA reporter can comprise a single-stranded DNA labelled with a detection moiety or can be any DNA reporter as disclosed herein.

[0303] In some embodiments, the target nucleic acid as described in the methods herein does not initially comprise a PAM sequence. However, any target nucleic acid of interest may be generated using the methods described herein to comprise a PAM sequence, and thus be a PAM target nucleic acid. A PAM target nucleic acid, as used herein, refers to a target nucleic acid that has been amplified to insert a PAM sequence that is recognized by a CRISPR/Cas system.

[0304] In some embodiments, the target nucleic acid is in a cell. In some embodiments, the cell is a single-cell eukaryotic organism; a plant cell an algal cell; a fungal cell; an animal cell; a cell from an invertebrate animal; a cell from a vertebrate animal such as fish, amphibian, reptile, bird, and mammal; or a cell from a mammal such as a human, a non-human primate, an ungulate, a feline, a bovine, an ovine, and a caprine. In preferred embodiments, the cell is a eukaryotic cell. In preferred embodiments, the cell is a mammalian cell, a human cell, or a plant cell.

[0305] Any of the above disclosed samples are consistent with the methods, compositions, reagents, enzymes, and kits disclosed herein and can be used as a companion diagnostic with any of the diseases disclosed herein, or can be used in reagent kits, point-of-care diagnostics, or over-the-counter diagnostics.

### Methods of Modifying or Editing a Target Nucleic Acid Sequence

[0306] The disclosure provides compositions and methods for modifying or editing a target nucleic acid sequence. In some embodiments, the target nucleic acid sequence is associated with (e.g., causes, at least in part) a disease or disorder described herein, including a liver disease or disorder, an eye disease or disorder, cystic fibrosis, or a muscle disease or disorder. In some examples, the target nucleic acid comprises at least a portion of any one of the following genes: DNMT1, HPRT1, RPL32P3, CCR5, FANCF, GRIN2B, EMX1, AAVS1, ALKBH5, CLTA, CDK11, CTNNB1, AXIN1, LRP6, TBK1, BAP1, TLE3, PPM1A, BCL2L2, SUFU, RICTOR, VPS35, TOP1, SIRT1, PTEN, MMD, PAQR8, H2AX, POUSF1, OCT4, SYS1, ARFRP1, TSPAN14, EMC2, EMC3, SEL1L, DERL2, UBE2G2, UBE2J1, HRD1, PCSK9, BAK1 and CFTR. In some embodiments, the target nucleic acid comprises at least a portion of a PCSK9 gene. In some embodiments, the PCSK9 gene comprises a mutation associated with a liver disease or disorder. In some embodiments, the target nucleic acid comprises at least a portion of a BAK1 gene. In some embodiments, the BAK1 gene comprises a mutation associated with an eye disease or disorder. In some embodiments, the target nucleic acid comprises at least a portion of a CFTR gene. In some embodiments, the CFTR gene comprises a mutation associated with cystic fibrosis. In some embodiments, the CFTR gene comprises a delta F508 mutation. Compositions and methods of the disclosure can be used for introducing a site-specific cleavage in a target nucleic acid sequence. The site-specific cleavage can be a double-strand cleavage. The site-specific cleavage can be a single-strand cleavage (e.g. nicking). The modification can result in introducing a mutation (e.g., point mutations, deletions) in a target nucleic acid. The modification can result in removing a disease-causing mutation in a nucleic acid sequence. Methods of the disclosure can be targeted to any locus in a genome of a cell. They can generate point mutations, deletions, null mutations, or tissue-specific mutations in a target nucleic acid sequence. A complex comprising a programmable nuclease and guide nucleic acid of the disclosure can be used to generate gene knock-out, gene knock-in, gene editing, gene tagging, or a combination thereof. In some embodiments, the activity of a nuclease, such as a cleavage product, may be analyzed using gel electrophoresis or nucleic acid sequencing.

[0307] The methods described herein (e.g., methods of introducing a nick or a double-stranded break into a target nucleic acid) may be used to edit or modify a target nucleic acid. Methods of modifying a target nucleic acid may use the compositions comprising a programmable nuclease and a gRNA as described herein. Modifying a target nucleic acid may comprise one or more of cleaving the target nucleic acid, deleting one or more nucleotides of the target nucleic acid, inserting one or more nucleotides into the target nucleic acid, mutating one or more nucleotides of the target nucleic acid, or modifying (e.g., methylating, demethylating, deaminating, or oxidizing) of one or more nucleotides of the target nucleic acid.

[0308] In some embodiments, modifying a target nucleic acid comprises genome editing. Genome editing may comprise modifying a genome, chromosome, plasmid, or other genetic material of a cell or organism. In some embodiments the genome, chromosome, plasmid, or other genetic material of the cell or organism is modified in vivo. In some embodiments the genome, chromosome, plasmid, or other genetic material of the cell or organism is modified in a cell. In some embodiments the genome, chromosome, plasmid, or other genetic material of the cell or organism is modified in vitro. For example, a plasmid may be modified in vitro using a composition described herein and introduced into a cell or organism. In some embodiments, modifying a target nucleic acid may comprise deleting a sequence from a target nucleic acid. For example, a mutated sequence or a sequence associated with a disease may be removed from a target nucleic acid. In some embodiments, modifying a target nucleic acid may comprise replacing a sequence in a target nucleic acid with a second sequence. For example, a mutated sequence or a sequence associated with a disease may be replaced with a second sequence lacking the mutation or that is not associated with the disease. In some embodiments, modifying a target nucleic acid may comprise introducing a sequence into a target nucleic acid. For example, a beneficial sequence or a sequence that may reduce or eliminate a disease may inserted into the target nucleic acid.

[0309] In some embodiments, the present disclosure provides methods and compositions for editing a target nucleic acid sequence comprising a programmable nuclease capable of introducing a double-strand break in a double stranded DNA (dsDNA) target sequence. The programmable nuclease can be coupled to a guide nucleic acid that targets a particular region of interest in the dsDNA. A double-strand break can be repaired and rejoined by non-homologous end joining (NHEJ) or homology directed repair (HDR). Thus, a programmable nuclease capable of introducing a double-strand break as disclosed herein can be useful in a genome editing method, for example, used for therapeutic applications to treat a disease or disorder, or for agricultural applications. Such diseases or disorders that can be treated by the methods and compositions described herein include a liver disease or disorder, an eye disease or disorder, cystic fibrosis, or a muscle disease or disorder. CasΦ programmable nuclease disclosed herein can be used for genome editing purposes to generate double strand breaks in order to excise a region of DNA and subsequently introduce a region of DNA (e.g., donor DNA) into the excised region.

[0310] In some embodiments, the present disclosure provides methods and compositions for modifying or editing a target nucleic acid sequence comprising two or more programmable nickases. For example, modifying a target nucleic acid may comprise introducing a two or more single-stranded breaks in the target nucleic acid. In some embodiments, a break may be introduced by contacting a target nucleic acid with a programmable nickase and a guide nucleic acid. The guide nucleic acid may bind to the programmable nickase and hybridize to a region of the target nucleic acid, thereby recruiting the programmable nickase to the region of the target nucleic acid. Binding of the programmable nickase to the guide nucleic acid and the region of the target nucleic acid may activate the programmable nickase, and the programmable nickase may introduce a break (e.g., a single stranded break) in the region of the target nucleic acid. In some embodiments, modifying a target nucleic acid may comprise introducing a first break in a first region of the target nucleic acid and a second break in a second region of the target nucleic acid. For example, modifying a target nucleic acid may comprise contacting a target nucleic acid with a first guide nucleic acid that binds to a first programmable nickase and hybridizes to a first region of the target nucleic acid and a second guide nucleic acid that binds to a second programmable nickase and hybridizes to a second region of the target nucleic acid. The first programmable nickase may introduce a first break in a first strand at the first region of the target nucleic acid, and the second programmable nickase may introduce a second break in a second strand at the second region of the target nucleic acid. In some embodiments, a segment of the target nucleic acid between the first break and the second break may be removed, thereby modifying the target nucleic acid. In some embodiments, a segment of the target nucleic acid between the first break and the second break may be replaced (e.g., with an insert sequence), thereby modifying the target nucleic acid.

[0311] The methods of the disclosure can use HDR or NHEJ. Following cleavage of a targeted genomic sequence, one of two alternative DNA repair mechanisms can restore chromosomal integrity: non-homologous end joining (NHEJ) which can generate insertions and/or deletions of a few base-pairs of DNA at the cut site. Alternatively, the cell can employ homology-directed repair (HDR), which can correct the lesion via an additional DNA template (e.g., donor) that spans the cut site. In some instances, the methods of the disclosure use microhomology-mediated end-joining (MMEJ).

[0312] Methods and compositions of the disclosure can be used to insert a donor polynucleotide into a target nucleic acid sequence. A donor polynucleotide can comprise a segment of nucleic acid to be integrated at a target genomic locus. The donor polynucleotide can comprise one or more polynucleotides of interest. The donor polynucleotide can comprise one or more expression cassettes. The expression cassette can comprise a donor polynucleotide of interest, a polynucleotide encoding a selection marker and/or a reporter gene, and regulatory components that influence expression.

[0313] The donor polynucleotide can comprise a genomic nucleic acid. The genomic nucleic acid can be derived from an animal, a mouse, a human, a non-human, a rodent, a non-human, a rat, a hamster, a rabbit, a pig, a bovine, a deer, a sheep, a goat, a chicken, a cat, a dog, a ferret, a primate (e.g., marmoset, rhesus monkey), domesticated mammal or an agricultural mammal, an avian, a bacterium, a archaeon, a virus, or any other organism of interest or a combination thereof. The donor polynucleotide may be synthetic.

[0314] Donor polynucleotides of any suitable size can be integrated into a genome. In some embodiments, the donor polynucleotide integrated into a genome is less than 3, about 3, 3.5, 4, 4.5, 5, 5.5, 6, 6.5, 7, 7.5, 8, 8.5, 9, 9.5, 10, 10.5, 11, 11.5, 12, 12.5, 13, 13.5, 14, 14.5, 15, 16, 17, 18, 19, 20, 25, 30, 35, 40, 45, 50, 100, 150, 200, 250, 300, 350, 400, 450, 500 or more than 500 kilobases (kb) in length. In some embodiments, the donor polynucleotide integrated into a genome is at least about 2, 2.5, 3, 3.5, 4, 4.5, 5, 5.5, 6, 6.5, 7, 7.5, 8, 8.5, 9, 9.5, 10, 10.5, 11, 11.5, 12, 12.5, 13, 13.5, 14, 14.5, 15, 16, 17, 18, 19, 20, 25, 30, 35, 40, 45, 50, 100, 150, 200, 250, 300, 350, 400, 450, 500 or more than 500 kb in length. In some embodiments, the donor polynucleotide integrated into a genome is up to about 3, 3.5, 4, 4.5, 5, 5.5, 6, 6.5, 7, 7.5, 8, 8.5, 9, 9.5, 10, 10.5, 11, 11.5, 12, 12.5, 13, 13.5, 14, 14.5, 15, 16, 17, 18, 19, 20, 25, 30, 35, 40, 45, 50, 100, 150, 200, 250, 300, 350, 400, 450, 500 or more than 500 kb in length.

[0315] The donor polynucleotide can be flanked by site-specific recombination target sequences (e.g., 5′ and 3′ homology arms) on a targeting vector. The length of a homology arm may be from about 50 to about 1000 bp. The length of a homology arm may be from about 400 to about 1000 bp. A homology arm can be of any length that is sufficient to promote a homologous recombination event with a corresponding target site, including for example, from about 400 bp to about 500 bp, from about 500 bp to about 600 bp, from about 600 bp to about 700 bp, from about 700 bp to about 800 bp, from about 800 bp to about 900 bp, or from about 900 bp to about 1000 bp. In preferred embodiments, the length of a homology arm may be from about 200 to about 300 bp. The sum total of 5′ and 3′ homology arms can be about 0.5 kb, 1 kb, 1.5 kb, 2 kb, 3 kb, 4 kb, 5 kb, 6 kb, 7 kb, 8 kb, 9 kb, about 0.5 kb to about 1 kb, about 1 kb to about 1.5 kb, about 1.5 kb to about 2 kb, about 2 kb to about 3 kb, about 3 kb to about 4 kb, about 4 kb to about 5 kb, about 5 kb to about 6 kb, about 6 kb to about 7 kb, about 8 kb to about 9 kb, or is at least 10 kb.

[0316] In some embodiments, the donor polynucleotide comprises one or more phosphorothioate bonds between nucleobases. In some embodiments, one or more of the first five 5′ nucleobases of the donor polynucleotide are linked by phosphorothioate bonds. In some embodiments, one or more of the five nucleobases at the 3′ end of the donor polynucleotide are linked by phosphorothioate bonds. In some embodiments, one or more of the first three 5′ nucleobases of the donor polynucleotide are linked by phosphorothioate bonds. In some embodiments, one or more of the three nucleobases at the 3′ end of the donor polynucleotide are linked by phosphorothioate bonds. In preferred embodiments, the two nucleobases at 5′ end of the donor polynucleotide are linked by a phosphorothioate bond. In some embodiments, the two nucleobases at the 3′ end of the donor polynucleotide are linked by a phosphorothioate bond. In more preferred embodiments, the two nucleobases at 5′ end of the donor polynucleotide are linked by a phosphorothioate bond and the two nucleobases at the 3′ end of the donor polynucleotide are linked by a phosphorothioate bond.

[0317] Examples of site-specific recombinases that can be used include, but are not limited to, Cre, Flp, and Dre recombinases. The site-specific recombinase can be introduced into the cell by any means, including by introducing the recombinase polypeptide into the cell or by introducing a polynucleotide encoding the site-specific recombinase into the host cell. The polynucleotide encoding the site-specific recombinase can be located within the insert polynucleotide or within a separate polynucleotide. The site-specific recombinase can be operably linked to a promoter active in the cell including, for example, an inducible promoter, a promoter that is endogenous to the cell, a promoter that is heterologous to the cell, a cell-specific promoter, a tissue-specific promoter, or a developmental stage-specific promoter. Site-specific recombination target sequences which can flank the insert polynucleotide or any polynucleotide of interest in the insert polynucleotide can include, but are not limited to, loxP, lox511, lox2272, lox66, lox71, loxM2, lox5171, FRT, FRT11, FRT71, attp, att, FRT, rox, and a combination thereof.

[0318] The target nucleic acid may comprise one or more of a genome, a chromosome, a plasmid, a gene, a promoter, an untranslated region, an open reading frame, an intron, an exon, or an operator. The target nucleic acid may comprise a segment of one or more of a genome, a chromosome, a plasmid, a gene, a promoter, an untranslated region, an open reading frame, an intron, an exon, or an operator. In some embodiments, the target nucleic acid may be part of a cell or an organism. In some embodiments, the target nucleic acid may be a cell-free genetic component.

[0319] In some embodiments, gene modifying or gene editing is achieved by fusing a programmable nuclease such as a CasΦ protein to a heterologous sequence. The heterologous sequence can be a suitable fusion partner, e.g., a polypeptide that provides recombinase activity by acting on the target nucleic acid sequence. In some embodiments, the fusion protein comprises a programmable nuclease such as a CasΦ protein fused to a heterologous sequence by a linker.

[0320] The heterologous sequence or fusion partner can be a site specific recombinase. The site specific recombinase can have recombinase activity. Examples of site-specific recombinases that can be used include, but are not limited to, Cre, Hin, Tre, and FLP recombinases. The heterologous sequence or fusion partner can be a recombinase catalytic domain. The recombinase catalytic domains can be from, for example, a tyrosine recombinase, a serine recombinase, a Gin recombinase, a Hin recombinase, a β recombinase, a Sin recombinase, a Tn3 recombinase, a γδ recombinase, a Cre recombinase, a FLP recombinase, or a phC31 integrase.

[0321] The heterologous sequence or fusion partner can be fused to the C-terminus, N-terminus, or an internal portion (e.g., a portion other than the N- or C-terminus) of the programmable nuclease, for example a dead CasΦ polypeptide.

[0322] The heterologous sequence or fusion partner can be fused to the programmable nuclease by a linker. A linker can be a peptide linker or a non-peptide linker. In some embodiments, the linker is an XTEN linker. In some embodiments, the linker comprises one or more repeats a tri-peptide GGS. In some embodiments, the linker is from 1 to 100 amino acids in length. In some embodiments, the linker is more 100 amino acids in length. In some embodiments, the linker is from 10 to 27 amino acids in length. A non-peptide linker can be a polyethylene glycol (PEG), polypropylene glycol (PPG), co-poly(ethylene/propylene) glycol, polyoxyethylene (POE), polyurethane, polyphosphazene, polysaccharides, dextran, polyvinyl alcohol, polyvinylpyrrolidones, polyvinyl ethyl ether, polyacryl amide, polyacrylate, polycyanoacrylates, lipid polymers, chitins, hyaluronic acid, heparin, or an alkyl linker.

[0323] In some embodiments, the CasΦ protein can comprise an enzymatically inactive and/or “dead” (abbreviated by “d”) programmable nuclease in combination (e.g., fusion) with a polypeptide comprising recombinase activity. Although a programmable CasΦ nuclease normally has nuclease activity, in some embodiments, a programmable CasΦ nuclease does not have nuclease activity.

[0324] A programmable nuclease can comprise a modified form of a wild type counterpart. The modified form of the wild type counterpart can comprise an amino acid change (e.g., deletion, insertion, or substitution) that reduces the nucleic acid-cleaving activity of the programmable nuclease. For example, a nuclease domain (e.g., RuvC domain) of a CasΦ polypeptide can be deleted or mutated so that it is no longer functional or comprises reduced nuclease activity. The modified form of the programmable nuclease can have less than 90%, less than 80%, less than 70%, less than 60%, less than 50%, less than 40%, less than 30%, less than 20%, less than 10%, less than 5%, or less than 1% of the nucleic acid-cleaving activity of the wild-type counterpart. The modified form of a programmable nuclease can have no substantial nucleic acid-cleaving activity. When a programmable nuclease is a modified form that has no substantial nucleic acid-cleaving activity, it can be referred to as enzymatically inactive and/or dead. A dead CasΦ polypeptide (e.g., dCasΦ) can bind to a target nucleic acid sequence but may not cleave the target nucleic acid sequence. A dCasΦ polypeptide can associate with a guide nucleic acid to activate or repress transcription of a target nucleic acid sequence.

[0325] In some embodiments, a programmable nuclease is a dead CasΦ polypeptide. A dead CasΦ polypeptide can comprise at least 70%, at least 75%, at least 80%, at least 85%, at least 90%, at least 92%, at least 95%, at least 97%, at least 99%, or 100% sequence identity with any one of SEQ ID NO: 1-SEQ ID NO: 47, SEQ ID NO. 105, and SEQ ID NO 107. In some embodiments, a programmable nuclease is a dead CasΦ polypeptide comprising at least 85% sequence identity to any one of SEQ ID NO: 1-SEQ ID NO: 47, SEQ ID NO. 105, and SEQ ID NO 107. In some embodiments, a programmable nuclease is a dead CasΦ polypeptide comprising at least 90% sequence identity to any one of SEQ ID NO: 1-SEQ ID NO: 47, SEQ ID NO. 105, and SEQ ID NO 107. In some embodiments, a programmable nuclease is a dead CasΦ polypeptide comprising at least 95% sequence identity to any one of SEQ ID NO: 1-SEQ ID NO: 47, SEQ ID NO. 105, and SEQ ID NO 107. In some embodiments, a programmable nuclease is a dead CasΦ polypeptide comprising at least 98% sequence identity to any one of SEQ ID NO: 1-SEQ ID NO: 47, SEQ ID NO. 105, and SEQ ID NO 107.

[0326] A deadCasΦ (also referred to herein as “dCasΦ”) polypeptide can form a ribonucleoprotein complex with a guide nucleic acid. The guide nucleic acid can comprise a crRNA sequence comprising at least 70%, at least 80%, at least 90%, at least 92%, at least 95%, at least 97%, or at least 99%, or 100% sequence identity to any one of SEQ ID NO: 48-SEQ ID NO: 86, or a reverse complement thereof.

[0327] Enzymatically inactive can refer to a polypeptide that can bind to a nucleic acid sequence in a polynucleotide in a sequence-specific manner, but may not cleave a target polynucleotide. An enzymatically inactive site-directed polypeptide can comprise an enzymatically inactive domain (e.g. a programmable nuclease domain). Enzymatically inactive can refer to no activity. Enzymatically inactive can refer to substantially no activity. Enzymatically inactive can refer to essentially no activity. Enzymatically inactive can refer to an activity less than 1%, less than 2%, less than 3%, less than 4%, less than 5%, less than 6%, less than 7%, less than 8%, less than 9%, or less than 10% activity compared to a wild-type exemplary activity (e.g., nucleic acid cleaving activity, wild-type CasΦ activity).

[0328] In further embodiments, methods of modifying cells are provided. In some embodiments, a method of modifying a cell comprising a target nucleic acid wherein the method comprises introducing a programmable CasΦ nuclease or variant thereof disclosed herein to the cell, wherein the programmable CasΦ nuclease or variant cleaves or modifies the target nucleic acid.

[0329] Modified cells obtained or obtainable by the methods described herein are provided. In some embodiments, a modified cell is obtained or is obtained by a method of modifying a cell disclosed herein.

[0330] In some embodiments, a CasΦ polypeptide disclosed herein is expressed in a cell. In some embodiments, a CasΦ polypeptide disclosed herein complexed with a guide nucleic is expressed in a cell. In some embodiments, a method disclosed herein comprises modifying or editing a cell. In some embodiments, a modified cell is provided wherein a cell is modified by a CasΦ polypeptide disclosed herein. In some embodiments, a cell is provided wherein the cell comprises a CasΦ polypeptide disclosed herein.

### Methods of Nicking of a Target Nucleic Acid

[0331] Disclosed herein are methods of introducing a break into a target nucleic acid. In some embodiments, the break may be a single stranded break (e.g., a nick). The programmable nickases disclosed herein and a gRNA disclosed herein may be used to introduce a single-stranded break into a target nucleic acid, for example a single stranded break in a double-stranded DNA.

[0332] A method of introducing a break into a target nucleic acid may comprise contacting the target nucleic acid with a first guide nucleic acid (e.g., a guide nucleic acid comprising a region that binds to a first programmable nickase) and a second guide nucleic acid (e.g., a guide nucleic acid comprising a region that binds to a second programmable nickase). The first guide nucleic acid may comprise an additional region that binds to the target nucleic acid, and the second guide nucleic acid may comprise an additional region that binds to the target nucleic acid. The additional region of the first guide nucleic acid and the additional region of the second guide nucleic acid may bind opposing strands of the target nucleic acid.

[0333] In some embodiments, a programmable nickase of the disclosure can cleave a non-target strand of a double-stranded target nucleic acid (e.g., DNA). In some embodiments, the programmable nickase may not cleave the target strand of the double-stranded target nucleic acid (e.g., DNA). The strand of a double-stranded target nucleic acid that is complementary to and hybridizes with the guide nucleic acid can be called the target strand. The strand of the double-stranded target DNA that is complementary to the target strand, and therefore is not complementary to the guide nucleic acid can be called non-target strand.

[0334] The temperature at which a ribonucleoprotein (RNP) complex comprising a programmable nuclease and a guide nucleic acid is formed (i.e. the RNP complexing temperature) can affect the nickase activity of the programmable nuclease. For example, an RNP complex formed at room temperature can have a greater nickase activity than an RNP complex formed at 37° C. In some cases, the RNP complex can be formed at room temperature, for example, from about 20° C. to 22° C. In some cases, the RNP complex can be formed at, for example, about 15° C., about 16° C., about 17° C., about 18° C., about 19° C., about 20° C., about 21° C., about 22° C., about 23° C., about 24° C., or about 25° C.

[0335] In some embodiments, a programmable nuclease may exhibit at least about 1.1-fold, at least about 1.2-fold, at least about 1.3-fold, at least about 1.4-fold, at least about 1.5-fold, at least about 1.6-fold, at least about 1.7-fold, at least about 1.8-fold, at least about 1.9-fold, at least about 2-fold, at least about 2.1-fold, at least about 2.2-fold, at least about 2.3-fold, at least about 2.4-fold, at least about 2.5-fold, at least about 2.6-fold, at least about 2.7-fold, at least about 2.8-fold, at least about 2.9-fold, at least about 3-fold, at least about 3.5-fold, at least about 4-fold, at least about 4.5-fold, at least about 5-fold, at least about 5.5-fold, at least about 6-fold, at least about 7-fold, at least about 8-fold, at least about 9-fold, at least about 10-fold, at least about 15-fold, at least about 20-fold, at least about 30-fold, at least about 40-fold, or at least about 50-fold greater nicking activity when complexed with a guide RNA at room temperature as compared to when complexed at 37° C.

[0336] The crRNA repeat sequence of a guide nucleic acid can affect the nickase activity of a programmable nuclease. For example, a programmable nuclease can comprise enhanced or greater nickase activity when complexed with guide nucleic acids comprising certain crRNA repeat sequences. For example, a programmable nuclease can comprise greater nickase activity when complexed with a guide RNA comprising a crRNA repeat sequence of CasΦ.18 as shown in TABLE 2. In another example, a programmable nuclease can comprise greater nickase activity when complexed with a guide RNA comprising a crRNA repeat sequence of CasΦ.7 as shown in TABLE 2. In some embodiments, a programmable nuclease may exhibit at least about 1.1-fold, at least about 1.2-fold, at least about 1.3-fold, at least about 1.4-fold, at least about 1.5-fold, at least about 1.6-fold, at least about 1.7-fold, at least about 1.8-fold, at least about 1.9-fold, at least about 2-fold, at least about 2.1-fold, at least about 2.2-fold, at least about 2.3-fold, at least about 2.4-fold, at least about 2.5-fold, at least about 2.6-fold, at least about 2.7-fold, at least about 2.8-fold, at least about 2.9-fold, at least about 3-fold, at least about 3.5-fold, at least about 4-fold, at least about 4.5-fold, at least about 5-fold, at least about 5.5-fold, at least about 6-fold, at least about 7-fold, at least about 8-fold, at least about 9-fold, at least about 10-fold, at least about 15-fold, at least about 20-fold, at least about 30-fold, at least about 40-fold, or at least about 50-fold greater nicking activity when complexed with a guide RNA comprising a specific crRNA repeat sequence as compared to when in a complex with a guide RNA comprising another crRNA repeat sequence.

[0337] The programmable nucleases disclosed herein may exhibit cis-cleavage activity or target cleavage activity. Target cleavage activity may refer to the cleavage of a target nucleic acid by the programmable nuclease. In some cases, the cis-cleavage activity results in double-stranded breaks in the target nucleic acids. In some cases, the cis-cleavage activity results in single-stranded breaks in the target nucleic acids. In some cases, the cis-cleavage activity produces a mixture of double- and single-stranded breaks in the target nucleic acids. In further cases, the rates of cis-cleavage double- and single-strand break formation may be dependent on the sequence of the guide nucleic acid. In some cases, the ratio of cis-cleavage double- and single-strand break formation may be dependent on the sequence of the guide nucleic acid. In some cases, the ratio or rate of cis-cleavage double- and single-strand break formation may be dependent on the repeat sequence of the crRNA of the guide nucleic acid. In some cases, the ratio or rate of cis-cleavage double- and single-strand break formation may be dependent on the temperature at which the ribonucleoprotein complex comprising the programmable nuclease and the guide nucleic acid are complexed.

[0338] A programmable nuclease for use in modifying a target nucleic acid may have greater nicking activity as compared to double stranded cleavage activity. In some embodiments, a programmable nuclease may exhibit at least about 1.1-fold, at least about 1.2-fold, at least about 1.3-fold, at least about 1.4-fold, at least about 1.5-fold, at least about 1.6-fold, at least about 1.7-fold, at least about 1.8-fold, at least about 1.9-fold, at least about 2-fold, at least about 2.1-fold, at least about 2.2-fold, at least about 2.3-fold, at least about 2.4-fold, at least about 2.5-fold, at least about 2.6-fold, at least about 2.7-fold, at least about 2.8-fold, at least about 2.9-fold, at least about 3-fold, at least about 3.5-fold, at least about 4-fold, at least about 4.5-fold, at least about 5-fold, at least about 5.5-fold, at least about 6-fold, at least about 7-fold, at least about 8-fold, at least about 9-fold, at least about 10-fold, at least about 15-fold, at least about 20-fold, at least about 30-fold, at least about 40-fold, or at least about 50-fold greater nicking activity as compared to double stranded cleavage activity.

[0339] In other cases, a programmable nuclease for use in modifying a target nucleic acid may have greater double stranded cleavage activity as compared to nicking activity. In some embodiments, a programmable nuclease may exhibit at least about 1.1-fold, at least about 1.2-fold, at least about 1.3-fold, at least about 1.4-fold, at least about 1.5-fold, at least about 1.6-fold, at least about 1.7-fold, at least about 1.8-fold, at least about 1.9-fold, at least about 2-fold, at least about 2.1-fold, at least about 2.2-fold, at least about 2.3-fold, at least about 2.4-fold, at least about 2.5-fold, at least about 2.6-fold, at least about 2.7-fold, at least about 2.8-fold, at least about 2.9-fold, at least about 3-fold, at least about 3.5-fold, at least about 4-fold, at least about 4.5-fold, at least about 5-fold, at least about 5.5-fold, at least about 6-fold, at least about 7-fold, at least about 8-fold, at least about 9-fold, at least about 10-fold, at least about 15-fold, at least about 20-fold, at least about 30-fold, at least about 40-fold, or at least about 50-fold greater double stranded cleavage activity as compared to nicking activity.

[0340] In some embodiments, the nicking activity and double stranded cleavage activity of a programmable nuclease depend on the conditions and species present in the sample containing the programmable nuclease. In some cases, the nicking activity and double stranded cleavage activity of the programmable nuclease are responsive to the sequence of the crRNA present in the guide nucleic acid. In some cases, the ratio of nicking activity and double stranded cleavage activity can be modulated by changing the sequence of the crRNA present. In some cases, the nicking activity and double stranded cleavage activity of the programmable nuclease respond differently to changes in temperature (e.g., RNP complexing temperature), pH, osmolarity, buffer, target nucleic acid concentration, ionic strength, and inhibitor concentration. In some embodiments, the ratio of nicking activity to cleavage activity by a programmable nuclease can be actively controlled by adjusting sample conditions and crRNA sequences.

### Methods of Regulating Gene Expression

[0341] In some embodiments, the disclosure provided methods and compositions for regulating gene expression. The methods and compositions can comprise use of an enzymatically inactive and/or “dead” (abbreviated by “d”) programmable nuclease in combination (e.g., fusion) with a polypeptide comprising transcriptional regulation activity. Although a programmable CasΦ nuclease normally has nuclease activity, in some embodiments, a programmable CasΦ nuclease does not have nuclease activity.

[0342] A programmable nuclease can comprise a modified form of a wild type counterpart. The modified form of the wild type counterpart can comprise an amino acid change (e.g., deletion, insertion, or substitution) that reduces the nucleic acid-cleaving activity of the programmable nuclease. For example, a nuclease domain (e.g., RuvC domain) of a CasΦ polypeptide can be deleted or mutated so that it is no longer functional or comprises reduced nuclease activity. The modified form of the programmable nuclease can have less than 90%, less than 80%, less than 70%, less than 60%, less than 50%, less than 40%, less than 30%, less than 20%, less than 10%, less than 5%, or less than 1% of the nucleic acid-cleaving activity of the wild-type counterpart. The modified form of a programmable nuclease can have no substantial nucleic acid-cleaving activity. When a programmable nuclease is a modified form that has no substantial nucleic acid-cleaving activity, it can be referred to as enzymatically inactive and/or dead. A dead CasΦ polypeptide (e.g., dCasΦ) can bind to a target nucleic acid sequence but may not cleave the target nucleic acid sequence. A dCasΦ polypeptide can associate with a guide nucleic acid to activate or repress transcription of a target nucleic acid sequence.

[0343] In some embodiments, the disclosure provides a method of selectively modulating transcription of a gene in a cell. The method can comprise introducing into a cell a (i) fusion polypeptide comprising a dCasΦ polypeptide and a polypeptide comprising transcriptional regulation activity, or a nucleic acid comprising a nucleotide sequence encoding the fusion polypeptide, wherein the dCasΦ polypeptide is enzymatically inactive or exhibits reduced nucleic acid cleavage activity; and ii) a guide nucleic acid, or a nucleic acid comprising a nucleotide sequence encoding the guide nucleic acid.

[0344] In some embodiments, a programmable nuclease is a dead CasΦ polypeptide. A dead CasΦ polypeptide can comprise at least 70%, at least 75%, at least 80%, at least 85%, at least 90%, at least 92%, at least 95%, at least 97%, at least 99%, or 100% sequence identity with any one of SEQ ID NO: 1-SEQ ID NO: 47, SEQ ID NO. 105, and SEQ ID NO 107. In some embodiments, a programmable nuclease is a dead CasΦ polypeptide comprising at least 85% sequence identity to any one of SEQ ID NO: 1-SEQ ID NO: 47, SEQ ID NO. 105, and SEQ ID NO 107. In some embodiments, a programmable nuclease is a dead CasΦ polypeptide comprising at least 90% sequence identity to any one of SEQ ID NO: 1-SEQ ID NO: 47, SEQ ID NO. 105, and SEQ ID NO 107. In some embodiments, a programmable nuclease is a dead CasΦ polypeptide comprising at least 95% sequence identity to any one of SEQ ID NO: 1-SEQ ID NO: 47, SEQ ID NO. 105, and SEQ ID NO 107. In some embodiments, a programmable nuclease is a dead CasΦ polypeptide comprising at least 98% sequence identity to any one of SEQ ID NO: 1-SEQ ID NO: 47, SEQ ID NO. 105, and SEQ ID NO 107.

[0345] A deadCasΦ (also referred to herein as “dCasΦ”) polypeptide can form a ribonucleoprotein complex with a guide nucleic acid. The guide nucleic acid can comprise a crRNA sequence comprising at least 70%, at least 80%, at least 90%, at least 92%, at least 95%, at least 97%, or at least 99%, or 100% sequence identity to any one of SEQ ID NO: 48-SEQ ID NO: 86, or a reverse complement thereof.

[0346] Enzymatically inactive can refer to a polypeptide that can bind to a nucleic acid sequence in a polynucleotide in a sequence-specific manner, but may not cleave a target polynucleotide. An enzymatically inactive site-directed polypeptide can comprise an enzymatically inactive domain (e.g. a programmable nuclease domain). Enzymatically inactive can refer to no activity. Enzymatically inactive can refer to substantially no activity. Enzymatically inactive can refer to essentially no activity. Enzymatically inactive can refer to an activity less than 1%, less than 2%, less than 3%, less than 4%, less than 5%, less than 6%, less than 7%, less than 8%, less than 9%, or less than 10% activity compared to a wild-type exemplary activity (e.g., nucleic acid cleaving activity, wild-type CasΦ activity).

[0347] Transcription regulation can be achieved by fusing a programmable nuclease such as a dead CasΦ protein to a heterologous sequence. The heterologous sequence can be a suitable fusion partner, e.g., a polypeptide that provides an activity that increases, decreases, or otherwise regulates transcription by acting on the target nucleic acid sequence or on a polypeptide (e.g., a histone or other DNA-binding protein) associated with the target nucleic acid sequence. Non-limiting examples of suitable fusion partners include a polypeptide that provides for transcription activation activity, transcription repression activity, nuclease activity, transcription release factor activity, histone modification activity, histone acetyltransferase activity, nucleic acid association activity, DNA methylase activity, direct or indirect DNA demethylase activity, methyltransferase activity, demethylase activity, acetyltransferase activity, deacetylase activity, kinase activity, phosphatase activity, ubiquitin ligase activity, deubiquitinating activity, adenylation activity, deaminase activity, deadenylation activity, SUMOylating activity, deSUMOylating activity, ribosylation activity, deribosylation activity, myristoylation activity, or demyristoylation activity.

[0348] Illustrative modifications performed by a fusion polypeptide can comprise methylation, demethylation, acetylation, deacetylation, ubiquitination, deubiquitination, deamination, alkylation, depurination, oxidation, pyrimidine dimer formation, transposition, recombination, chain elongation, ligation, glycosylation. Phosphorylation, dephosphorylation, adenylation, deadenylation, SUMOylation, deSUMOylation, ribosylation, deribosylation, myristoylation, remodeling, cleavage, oxidoreduction, hydrolation, or isomerization.

[0349] The heterologous sequence or fusion partner can be fused to the C-terminus, N-terminus, or an internal portion (e.g., a portion other than the N- or C-terminus) of the programmable nuclease, for example a dead CasΦ polypeptide. Non-limiting examples of fusion partners include transcription activators, transcription repressors, histone lysine methyltransferases (KMT), Histone Lysine Demethylates, Histone lysine acetyltransferases (KAT), Histone lysine deacetylase, DNA methylases (adenosine or cytosine modification), deaminases, CTCF, periphery recruitment elements (e.g., Lamin A, Lamin B), and protein docking elements (e.g., FKBP/FRB).

[0350] Non-limiting examples of transcription activators include GAL4, VP16, VP64, and p65 subdomain (NFkappaB).

[0351] Non-limiting examples of transcription repressors include Kruippel associated box (KRAB or SKD), the Mad mSIN3 interaction domain (SID), and the ERF repressor domain (ERD).

[0352] Non-limiting examples of histone lysine methyltransferases (KMT) include members from KMT1 family (e.g., SUV39H1, SUV39H2, G9A, ESET/SETDB1, Clr4, Su(var)3-9), KMT2 family members (e.g., hSET1A, hSET1 B, MLL 1 to 5, ASH1, and homologs (Trx, Trr, Ash1)), KMT3 family (SYMD2, NSD1), KMT4 (DOT1L and homologs), KMT5 family (Pr-SET7/8, SUV4-20H1, and homologs), KMT6 (EZH2), and KMT8 (e.g., RIZ1).

[0353] Non-limiting examples of Histone Lysine Demethylates (KDM) include members from KDM1 family (LSD1/BHC110, Splsd1/Swm1/Saf11 0, Su(var)3-3), KDM3 family (JHDM2a/b), KDM4 family (JMJD2A/JHDM3A, JMJD2B, JMJD2C/GASC1, JMJD2D, and homologs (Rph1)), KDM5 family (JARID1A/RBP2, JARID1 B/PLU-1, JARIDIC/SMCX, JARID1D/SMCY, and homologs (Lid, Jhn2, Jmj2)), and KDM6 family (e.g., UTX, JMJD3).

[0354] Non-limiting examples of KAT include members of KAT2 family (hGCN5, PCAF, and homologs (dGCN5/PCAF, Gcn5), KAT3 family (CBP, p300, and homologs (dCBP/NEJ)), KAT4, KAT5, KAT6, KAT7, KAT8, and KAT13.

[0355] In some embodiments, the disclosure provides methods for increasing transcription of a target nucleic acid sequence. The transcription of a target nucleic acid sequence can increase by at least about 1.1 fold, at least about 1.2 fold, at least about 1.3 fold, at least about 1.4 fold, at least about 1.5 fold, at least about 1.6 fold, at least about 1.7 fold, at least about 1.8 fold, at least about 1.9 fold, at least about 2 fold, at least about 2.5 fold, at least about 3 fold, at least about 3.5 fold, at least about 4 fold, at least about 4.5 fold, at least about 5 fold, at least about 6 fold, at least about 7 fold, at least about 8 fold, at least about 9 fold, at least about 10 fold, at least about 12 fold, at least about 15 fold, at least about 20-fold, at least about 50-fold, at least about 70-fold, or at least about 100-fold compared to the level of transcription of the target nucleic acid sequence in the absence of a fusion polypeptide comprising a enzymatically inactive or enzymatically reduced programmable nuclease (e.g., dead CasΦ protein).

[0356] In some embodiments, the disclosure provides methods for decreasing transcription of a target nucleic acid sequence. The transcription of a target nucleic acid sequence can decrease by at least about 1.1 fold, at least about 1.2 fold, at least about 1.3 fold, at least about 1.4 fold, at least about 1.5 fold, at least about 1.6 fold, at least about 1.7 fold, at least about 1.8 fold, at least about 1.9 fold, at least about 2 fold, at least about 2.5 fold, at least about 3 fold, at least about 3.5 fold, at least about 4 fold, at least about 4.5 fold, at least about 5 fold, at least about 6 fold, at least about 7 fold, at least about 8 fold, at least about 9 fold, at least about 10 fold, at least about 12 fold, at least about 15 fold, at least about 20-fold, at least about 50-fold, at least about 70-fold, or at least about 100-fold compared to the level of transcription of the target nucleic acid sequence in the absence of a fusion polypeptide comprising a enzymatically inactive or enzymatically reduced programmable nuclease (e.g., dead Cas 12j protein).

### Method of Treating a Disorder

[0357] The compositions and methods described herein may be used to treat, prevent, or inhibit an ailment in a subject. The ailments may include diseases, cancers, genetic disorders, neoplasias, and infections. In some cases, the disease or disorder for treatment is a liver disease or disorder, an eye disease or disorder, cystic fibrosis, or a muscle disease or disorder. In some cases, the ailments are associated with one or more genetic sequences, including but not limited to 11-hydroxylase deficiency; 17,20-desmolase deficiency; 17-hydroxylase deficiency; 3-hydroxyisobutyrate aciduria; 3-hydroxysteroid dehydrogenase deficiency; 46,XY gonadal dysgenesis; AAA syndrome; ABCA3 deficiency; ABCC8-associated hyperinsulinism; aceruloplasminemia; achondrogenesis type 2; acral peeling skin syndrome; acrodermatitis enteropathica; adrenocortical micronodular hyperplasia; adrenoleukodystrophies; adrenomyeloneuropathies; Aicardi-Goutieres syndrome; Alagille disease; Alpers syndrome; alpha-mannosidosis; Alstrom syndrome; Alzheimer disease; amelogenesis imperfecta; amish type microcephaly; amyotrophic lateral sclerosis (ALS); anauxetic dysplasia; androgen insensitivity syndrome; Antley-Bixler syndrome; APECED, Apert syndrome, aplasia of lacrimal and salivary glands, argininemia, arrhythmogenic right ventricular dysplasia, Arts syndrome, ARVD2, arylsulfatase deficiency type metachromatic leokodystrophy, ataxia telangiectasia, autoimmune lymphoproliferative syndrome; autoimmune polyglandular syndrome type 1; autosomal dominant anhidrotic ectodermal dysplasia; autosomal dominant polycystic kidney disease; autosomal recessive microtia; autosomal recessive renal glucosuria; autosomal visceral heterotaxy; Bardet-Biedl syndrome; Bartter syndrome; basal cell nevus syndrome; Batten disease; benign recurrent intrahepatic cholestasis; beta-mannosidosis; Bethlem myopathy; Blackfan-Diamond anemia; blepharophimosis; Byler disease; C syndrome; CADASIL; carbamyl phosphate synthetase deficiency; cardiofaciocutaneous syndrome; Carney triad; carnitine palmitoyltransferase deficiencies; cartilage-hair hypoplasia; cblC type of combined methylmalonic aciduria; CD18 deficiency; CD3Z-associated primary T-cell immunodeficiency; CD40L deficiency; CDAGS syndrome; CDG1A; CDG1B; CDG1M; CDG2C; CEDNIK syndrome; central core disease; centronuclear myopathy; cerebral capillary malformation; cerebrooculofacioskeletal syndrome type 4; cerebrooculogacioskeletal syndrome; cerebrotendinous xanthomatosis; CHARGE association; cherubism; CHILD syndrome; chronic granulomatous disease; chronic recurrent multifocal osteomyelitis; citrin deficiency; classic hemochromatosis; CNPPB syndrome; cobalamin C disease; Cockayne syndrome; coenzyme Q10 deficiency; Coffin-Lowry syndrome; Cohen syndrome; combined deficiency of coagulation factors V; common variable immune deficiency; complete androgen insentivity; cone rod dystrophies; conformational diseases; congenital bile adid synthesis defect type 1; congenital bile adid synthesis defect type 2; congenital defect in bile acid synthesis type; congenital erythropoietic porphyria; congenital generalized osteosclerosis; Cornelia de Lange syndrome; Cousin syndrome; Cowden disease; COX deficiency; Crigler-Najjar disease; Crigler-Najjar syndrome type 1; Crisponi syndrome; Currarino syndrome; Curth-Macklin type ichthyosis hystrix; cutis laxa; cystic fibrosis; cystinosis; d-2-hydroxyglutaric aciduria; DDP syndrome; Dejerine-Sottas disease; Denys-Drash syndrome; desmin cardiomyopathy; desmin myopathy; DGUOK-associated mitochondrial DNA depletion; disorders of glutamate metabolism; distal spinal muscular atrophy type 5; DNA repair diseases; dominant optic atrophy; Doyne honeycomb retinal dystrophy; Duchenne muscular dystrophy; dyskeratosis congenita; Ehlers-Danlos syndrome type 4; Ehlers-Danlos syndromes; Elejalde disease; Ellis-van Creveld disease; Emery-Dreifuss muscular dystrophies; encephalomyopathic mtDNA depletion syndrome; enzymatic diseases; EPCAM-associated congenital tufting enteropathy; epidermolysis bullosa with pyloric atresia; exercise-induced hypoglycemia; facioscapulohumeral muscular dystrophy; Faisalabad histiocytosis; familial atypical mycobacteriosis; familial capillary malformation-arteriovenous; familial esophageal achalasia; familial glomuvenous malformation; familial hemophagocytic lymphohistiocytosis; familial mediterranean fever; familial megacalyces; familial schwannomatosisl; familial spina bifida; familial splenic asplenia/hypoplasia; familial thrombotic thrombocytopenia purpura; Fanconi disease; Feingold syndrome; FENIB; fibrodysplasia ossificans progressiva; FKTN; Francois-Neetens fleck corneal dystrophy; Frasier syndrome; Friedreich ataxia; FTDP-17; fucosidosis; G6PD deficiency; galactosialidosis; Galloway syndrome; Gardner syndrome; Gaucher disease; Gitelman syndrome; GLUT1 deficiency; glycogen storage disease type 1b; glycogen storage disease type 2; glycogen storage disease type 3; glycogen storage disease type 4; glycogen storage disease type 9a; glycogen storage diseases; GM1-gangliosidosis; Greenberg syndrome; Greig cephalopolysyndactyly syndrome; hair genetic diseases; HANAC syndrome; harlequin type ichtyosis congenita; HDR syndrome; hemochromatosis type 3; hemochromatosis type 4; hemophilia A; hereditary angioedema type 3; hereditary angioedemas; hereditary hemorrhagic telangiectasia; hereditary hypofibrinogenemia; hereditary intraosseous vascular malformation; hereditary leiomyomatosis and renal cell cancer; hereditary neuralgic amyotrophy; hereditary sensory and autonomic neuropathy type; Hermansky-Pudlak disease; HHH syndrome; HHT2; hidrotic ectodermal dysplasia type 1; hidrotic ectodermal dysplasias; HNF4A-associated hyperinsulinism; HNPCC; human immunodeficiency with microcephaly; Huntington disease; hyper-IgD syndrome; hyperinsulinism-hyperammonemia syndrome; hypertrophy of the retinal pigment epithelium; hypochondrogenesis; hypohidrotic ectodermal dysplasia; ICF syndrome; idiopathic congenital intestinal pseudo-obstruction; immunodeficiency with hyper-IgM type 1; immunodeficiency with hyper-IgM type 3; immunodeficiency with hyper-IgM type 4; immunodeficiency with hyper-IgM type 5; inborm errors of thyroid metabolism; infantile visceral myopathy; infantile X-linked spinal muscular atrophy; intrahepatic cholestasis of pregnancy; IPEX syndrome; IRAK4 deficiency; isolated congenital asplenia; Jeune syndrome Imag; Johanson-Blizzard syndrome; Joubert syndrome; JP-HHT syndrome; juvenile hemochromatosis; juvenile hyalin fibromatosis; juvenile nephronophthisis; Kabuki mask syndrome; Kallmann syndromes; Kartagener syndrome; KCNJ11-associated hyperinsulinism; Kearns-Sayre syndrome; Kostmann disease; Kozlowski type of spondylometaphyseal dysplasia; Krabbe disease; LADD syndrome; late infantile-onset neuronal ceroid lipofuscinosis; LCK deficiency; LDHCP syndrome; Legius syndrome; Leigh syndrome; lethal congenital contracture syndrome 2; lethal congenital contracture syndromes; lethal contractural syndrome type 3; lethal neonatal CPT deficiency type 2; lethal osteosclerotic bone dysplasia; LIG4 syndrome; lissencephaly type 1 Imag; lissencephaly type 3; Loeys-Dietz syndrome; low phospholipid-associated cholelithiasis; lysinuric protein intolerance; Maffucci syndrome; Majeed syndrome; mannose-binding protein deficiency; Marfan disease; Marshall syndrome; MASA syndrome; MCAD deficiency; McCune-Albright syndrome; MCKD2; Meckel syndrome; Meesmann corneal dystrophy; megacystis-microcolon-intestinal hypoperistalsis; megaloblastic anemia type 1; MEHMO; MELAS; Melnick-Needles syndrome; MEN2s; Menkes disease; metachromatic leukodystrophies; methylmalonic acidurias; methylvalonic aciduria; microcoria-congenital nephrosis syndrome; microvillous atrophy; mitochondrial neurogastrointestinal encephalomyopathy; monilethrix; monosomy X; mosaic trisomy 9 syndrome; Mowat-Wilson syndrome; mucolipidosis type 2; mucolipidosis type Ma; mucolipidosis type IV; mucopolysaccharidoses; mucopolysaccharidosis type 3A; mucopolysaccharidosis type 3C; mucopolysaccharidosis type 4B; multiminicore disease; multiple acyl-CoA dehydrogenation deficiency; multiple cutaneous and mucosal venous malformations; multiple endocrine neoplasia type 1; multiple sulfatase deficiency; NAIC; nail-patella syndrome; nemaline myopathies; neonatal diabetes mellitus; neonatal surfactant deficiency; nephronophtisis; Netherton disease; neurofibromatoses; neurofibromatosis type 1; Niemann-Pick disease type A; Niemann-Pick disease type B; Niemann-Pick disease type C; NKX2E; Noonan syndrome; North American Indian childhood cirrhosis; NROB1 duplication-associated DSD; ocular genetic diseases; oculo-auricular syndrome; OLEDAID; oligomeganephronia; oligomeganephronic renal hypolasia; Ollier disease; Opitz-Kaveggia syndrome; orofaciodigital syndrome type 1; orofaciodigital syndrome type 2; osseous Paget disease; otopalatodigital syndrome type 2; OXPHOS diseases; palmoplantar hyperkeratosis; panlobar nephroblastomatosis; Parkes-Weber syndrome; Parkinson disease; partial deletion of 21q22.2-q22.3; Pearson syndrome; Pelizaeus-Merzbacher disease; Pendred syndrome; pentalogy of Cantrell; peroxisomal acyl-CoA-oxidase deficiency; Peutz-Jeghers syndrome; Pfeiffer syndrome; Pierson syndrome; pigmented nodular adrenocortical disease; pipecolic acidemia; Pitt-Hopkins syndrome; plasmalogens deficiency; pleuropulmonary blastoma and cystic nephroma; polycystic lipomembranous osteodysplasia; porphyrias; premature ovarian failure; primary erythermalgia; primary hemochromatoses; primary hyperoxaluria; progressive familial intrahepatic cholestasis; propionic acidemia; pyruvate decarboxylase deficiency; RAPADILINO syndrome; renal cystinosis; rhabdoid tumor predisposition syndrome; Rieger syndrome; ring chromosome 4; Roberts syndrome; Robinow-Sorauf syndrome; Rothmund-Thomson syndrome; SCID; Saethre-Chotzen syndrome; Sandhoff disease; SC phocomelia syndrome; SCAS; Schinzel phocomelia syndrome; short rib-polydactyly syndrome type 1; short rib-polydactyly syndrome type 4; short-rib polydactyly syndrome type 2; short-rib polydactyly syndrome type 3; Shwachman disease; Shwachman-Diamond disease; sickle cell anemia; Silver-Russell syndrome; Simpson-Golabi-Behmel syndrome; Smith-Lemli-Opitz syndrome; SPG7-associated hereditary spastic paraplegia; spherocytosis; split-hand/foot malformation with long bone deficiencies; spondylocostal dysostosis; sporadic visceral myopathy with inclusion bodies; storage diseases; STRA6-associated syndrome; Tay-Sachs disease; thanatophoric dysplasia; thyroid metabolism diseases; Tourette syndrome; transthyretin-associated amyloidosis; trisomy 13; trisomy 22; trisomy 2p syndrome; tuberous sclerosis; tufting enteropathy; urea cycle diseases; Van Den Ende-Gupta syndrome; Van der Woude syndrome; variegated mosaic aneuploidy syndrome; VLCAD deficiency; von Hippel-Lindau disease; Waardenburg syndrome; WAGR syndrome; Walker-Warburg syndrome; Werner syndrome; Wilson disease; Wolcott-Rallison syndrome; Wolfram syndrome; X-linked agammaglobulinemia; X-linked chronic idiopathic intestinal pseudo-obstruction; X-linked cleft palate with ankyloglossia; X-linked dominant chondrodysplasia punctata; X-linked ectodermal dysplasia; X-linked Emery-Dreifuss muscular dystrophy; X-linked lissencephaly; X-linked lymphoproliferative disease; X-linked visceral heterotaxy; xanthinuria type 1; xanthinuria type 2; xeroderma pigmentosum; XPV; and Zellweger disease. In some embodiments, the ailment is Duchenne muscular dystrophy. In some embodiments, the ailment is myotonic dystrophy Type 1 (DM1). In some embodiments, the ailment is blindness or an inherited disease affecting the back of the eye. In some embodiments, the ailment is deafness. In some embodiments, the ailment is progeria. In some embodiments, the ailment is multiple sclerosis. In some embodiments, the ailment is cancer. In some embodiments, the ailment is a lysosomal storage disease, e.g., Hunter syndrome, Hurler syndrome. In some embodiments, the ailment is hypercholesterolemia. In some embodiments, the ailment is Stargardt macular dystrophy. In some embodiments, the ailment is In preferred embodiments, the ailment is cystic fibrosis.

[0358] In some embodiments, treating, preventing, or inhibiting an ailment in a subject may comprise contacting a target nucleic acid associated with a particular ailment to a programmable nuclease (e.g., a CasΦ programmable nuclease). In some aspects, the methods of treating, preventing, or inhibiting an ailment may involve removing, modifying, replacing, transposing, or affecting the regulation of a genomic sequence of a patient in need thereof. In some embodiments, the methods of treating, preventing, or inhibiting an ailment may involve modulating gene expression. In some embodiments, the methods of treating, preventing, or inhibiting an ailment may comprise targeting a nucleic acid sequence associated with a pathogen, such as a virus or bacteria, to a programmable nuclease of the present disclosure.

[0359] The compositions and methods described herein may be used to treat, prevent, diagnose, or identify a cancer in a subject. In some aspects, the methods may target cells or tissues. In some embodiments, the methods may be applied to subjects, such as humans. As used herein, the term “cancer” refers to a physiological condition that may be characterized by abnormal or unregulated cell growth or activity. In some cases, cancer may involve the spread of the cells exhibiting abnormal or unregulated growth or activity between various tissues in a subject. In some aspects, cancer may be a genetic condition. Examples of cancers include, but are not limited to Acute Lymphoblastic Leukemia, Acute Myeloid Leukemia, Adrenocortical Carcinoma, Anal Cancer, Astrocytomas, Bile Duct Cancer, Bladder Cancer, Bone Cancer, Brain Cancer, Breast Cancer, Bronchial Cancer, Burkitt Lymphoma, Carcinoma, Cardiac Tumors, Cervical Cancer, Chordoma, Chronic Lymphocytic Leukemia, Chronic Myelogenous Leukemia, Chronic Myeloproliferative Neoplasms, Colon Cancer, Colorectal Cancer, Craniopharyngioma, Cutaneous T-cell lymphoma, Ductal Carcinoma, Embryonal Tumors, Endometrial Cancer, Ependymoma, Esophageal Cancer, Esthesioneuroblastoma, Ewing Sarcoma, Extracranial Germ Cell Tumors, Extragonadal Germ Cell Tumors, Fallopian Tube Cancer, Fibrous Histiocytoma, Gallbladder Cancer, Gastric Cancer, Gastrointestinal Cancer, Gastrointestinal Carcinoid Cancer, Gastrointestinal Stromal Tumors, Gestational Trophoblastic Disease, Hairy Cell Leukemia, Head and Neck Cancer, Heart Tumors, Hepatocellular Cancer, Histiocytosis, Hodgkin Lymphoma, Hypopharyngeal Cancer, Intraocular Melanoma, Islet Cell Tumors, Kaposi Sarcoma, Kidney cancer, Langerhans Cell Histiocytosis, Laryngeal Cancer, Leukemia, Lip and Oral Cavity Cancer, Liver Cancer, Lung Cancer, Lymphoma, Malignant Fibrous Histiocytoma, Melanoma, Merkel Cell Carcinoma, Mesothelioma, Metastatic Squamous Neck Cancer, Midline Tract Carcinoma, Mouth Cancer, Multiple Endocrine Neoplasia Syndromes, Multiple Myeloma, Mycosis Fungoides, Myelodysplastic Syndromes, Myelogenous Leukemia, Myeloid Leukemia, Myeloproliferative Neoplasms, Nasal Cavity and Paranasal Sinus Cancer, Nasopharyngeal Cancer, Neuroblastoma, Non-Hodgkin Lymphoma, Non-Small Cell Lung Cancer, Oral Cancer, Osteosarcoma, Ovarian Cancer, Pancreatic Cancer, Pancreatic Neuroendocrine Tumors, Papillomatosis, Paraganglioma, Paranasal Sinus and Nasal Cavity Cancer, Parathyroid Cancer, Penile Cancer, Pharyngeal Cancer, Pheochromocytoma, Pituitary Tumor, Plasma Cell Neoplasm, Pleuropulmonary Blastoma, Primary Central Nervous System (CNS) Lymphoma, Primary Peritoneal Cancer, Prostate Cancer, Rectal Cancer, Recurrent Cancer, Renal Cell Cancer, Retinoblastoma, Rhabdomyosarcoma, Salivary Gland Cancer, Sezary Syndrome, Skin Cancer, Small Cell Lung Cancer, Small Intestine Cancer, Soft Tissue Sarcoma, Squamous Cell Carcinoma, Squamous Neck Cancer with Occult Primary, Stomach Cancer, T-Cell Lymphoma, Testicular Cancer, Throat Cancer, Thymoma and Thymic Carcinoma, Thyroid Cancer, Tracheobronchial Cancer, Transitional Cell Cancer of the Renal Pelvis and Ureter, Ureter Cancer, Renal Pelvis Cancer, Urethral Cancer, Uterine Cancer, Uterine Sarcoma, Vaginal Cancer, Vascular Tumors, Vulvar Cancer, and Wilms Tumor.

[0360] In some cases, a cancer is associated with one or more particular biomarkers. A biomarker is a chemical species or profile that may serve as an indicator of a cellular or organismal state (e.g., the presence or absence of a disease). Non-limiting examples of biomarkers include biomolecules, nucleic acid sequences, proteins, metabolites, nucleic acids, protein modifications. A biomarker may refer to one species or to a plurality of species, such as a cell surface profile.

[0361] The methods of the present disclosure (e.g., methods of modifying a target nucleic acid) may comprise targeting a biomarker or a nucleic acid associated with a biomarker with a programmable nuclease of the disclosure (e.g., a CasΦ). In some cases, the biomarker is a gene associated with a cancer. Non-limiting examples of genes associated with cancers include, ABL, AF4/HRX, AKT-2, ALK, ALK/NPM, AML1, AML1/MTG8, APC, ATM, AXIN2, AXL, BAP1, BARD1, BCL-2, BCL-3, BCL-6, BCR/ABL, BLM, BMPR1A, BRCA1, BRCA2, BRIP1, c-MYC, CASR, CDC73, CDH1, CDK4, CDKN1B, CDKN1C, CDKN2A, CEBPA, CHEK2, CTNNA1, DBL, DEK/CAN, DICER1, DIS3L2, E2A/PBX1, EGFR, ENL/HRX, EPCAM, ERG/TLS, ERBB, ERBB-2, ETS-1, EWS/FLI-1, FH, FLCN, FMS, FOS, FPS, GATA2, GLI, GPGSP, GREM1, HER2/neu, HOX11, HOXB13, HST, IL-3, INT-2, JUN, KIT, KS3, K-SAM, LBC, LCK, LMO1, LMO2, L-MYC, LYL-1, LYT-10, LYT-10/Cα1, MAS, MAX, MDM-2, MEN1, MET, MITF, MLH1, MLL, MOS, MSH1, MSH2, MSH3, MSH6, MTG8/AML1, MUTYH, MYB, MYH11/CBFB, NBN, NEU, NF1, NF2, N-MYC, NTHL1, OST, PALB2, PAX-5, PBX1/E2A, PDGFRA, PHOX2B, PIM-1, PMS2, POLD1, POLE, POT1, PRAD-1, PRKAR1A, PTCH1, PTEN, RAD50, RAD51C, RAD51D, RAF, RAR/PML, RAS-H, RAS-K, RAS-N, RB1, RECQL4, REL/NRG, RET, RHOM1, RHOM2, ROS, RUNX1, SDHA, SDHAF, SDHB, SDHC, SDHD, SET/CAN, SIS, SKI, SMAD4, SMARCA4, SMARCB1, SMARCE1, SRC, STK11, SUFU, TAL1, TAL2, TAN-1, TIAM1, TERC, TERT, TMEM127, TP53, TSC1, TSC2, TRK, VHL, WRN, and WT1. In some cases, a gene biomarker for cancer will carry one or more mutations. In some cases, a gene biomarker for a cancer will be upregulated or downregulated relative to a patient or sample that does not have the cancer.

[0362] The compositions and methods described herein may be suitable for autologous or allogeneic treatment, as well as ex vivo cell-based treatments.

[0363] The compositions and methods described herein may be used to treat, prevent, diagnose, or identify an infection in a subject. In some embodiments, the subject is an animal (e.g., a mammal, such as a human). In some embodiments, the subject is a plant (e.g., a crop).

[0364] In some aspects, the disclosure provides the programmable CasΦ nucleases and compositions described herein for use in a method of treatment. In some embodiments, the disclosure provides the CasΦ programmable nucleases and compositions described herein for use in a method of treating an ailment recited above.

[0365] In some aspects, the disclosure provides the programmable CasΦ nucleases and compositions described herein for use as a medicament.

### Methods of Detecting a Target Nucleic Acid

[0366] The present disclosure provides methods and compositions, which enable target nucleic acid detection by programmable nuclease platforms, such as the DNA Endonuclease Targeted CRISPR TransReporter (DETECTR) platform. In some embodiments, the target nucleic acid is a DNA. In some embodiments, the target nucleic acid is a RNA.

[0367] A number of reagents are consistent with the compositions and methods disclosed herein. The reagents described herein may be used for nicking target nucleic acids and for detection of target nucleic acids. The reagents disclosed herein can include programmable nucleases, guide nucleic acids, target nucleic acids, and buffers. As described herein, target nucleic acid comprising DNA or RNA may be modified or detected (e.g., the target nucleic acid hybridizes to the guide nucleic) using a programmable nuclease (e.g., a CasΦ as disclosed herein) and other reagents disclosed herein. As described herein, target nucleic acids comprising DNA may be an amplicon of a nucleic acid of interest and the amplicon can be detected using a programmable nuclease (e.g., a CasΦ as disclosed herein) and other reagents disclosed herein. Additionally, detection of multiple target nucleic acids is possible using two or more programmable nickases or a programmable nickase with a non-nickase programmable nuclease complexed to guide nucleic acids that target the multiple target nucleic acids, wherein the programmable nucleases exhibit different sequence-independent cleavage of the nucleic acid of a reporter (e.g., cleavage of an RNA reporter by a first programmable nuclease and cleavage of a DNA reporter by a second programmable nuclease).

[0368] In some embodiments, target nucleic acid from a sample is amplified before assaying for cleavage of reporters. Target DNA can be amplified by PCR or isothermal amplification techniques. DNA amplification methods that are compatible with the DETECTR technology can be used for programmable nucleases disclosed herein. For example, ssDNA can be amplified. Amplification of ssDNA instead of dsDNA can enable PAM-independent detection of nucleic acids by proteins with PAM requirements for dsDNA-activated trans-cleavage.

[0369] Certain programmable nucleases (e.g., a CasΦ as disclosed herein) of the disclosure can exhibit indiscriminate trans-cleavage of ssDNA, enabling their use for detection of DNA in samples. In some embodiments, target ssDNA are generated from many nucleic acid templates (RNA, ss/dsDNA) in order to achieve cleavage of the FQ reporter in the DETECTR platform. Certain programmable nucleases can be activated by ssDNA, upon which they can exhibit trans-cleavage of ssDNA and can, thereby, be used to cleave ssDNA FQ reporter molecules in the DETECTR system. These programmable nucleases can target ssDNA present in the sample, or generated and/or amplified from any number of nucleic acid templates (RNA, ssDNA, or dsDNA).

[0370] The compositions, kits and methods disclosed herein may be implemented in methods of assaying for a target nucleic acid. In some embodiments, a method of assaying for a target nucleic acid in a sample, comprises: contacting the sample to a complex comprising a guide nucleic acid comprising a segment that is reverse complementary to a segment of the target nucleic acid and a programmable nuclease (e.g., a CasΦ as disclosed herein) of the disclosure that exhibits sequence independent cleavage upon forming a complex comprising the segment of the guide nucleic acid binding to the segment of the target nucleic acid, wherein the sample comprises at least one nucleic acid comprising at least 50% sequence identity to the segment of the target nucleic acid; and assaying for cleavage of at least one reporter nucleic acids of a population of reporter nucleic acids, wherein the cleavage indicates a presence of the target nucleic acid in the sample and wherein absence of the cleavage indicates an absence of the target nucleic acid in the sample.

[0371] The target nucleic acid can be from 0.05% to 20% of total nucleic acids in the sample. Sometimes, the target nucleic acid is from 0.1% to 10% of the total nucleic acids in the sample. The target nucleic acid, in some cases, is from 0.1% to 5% of the total nucleic acids in the sample. Often, a sample comprises the segment of the target nucleic acid and at least one nucleic acid comprising less than 100% sequence identity to the segment of the target nucleic acid but no less than 50% sequence identity to the segment of the target nucleic acid. For example, the segment of the target nucleic acid comprises a mutation as compared to at least one nucleic acid comprising less than 100% sequence identity to the segment of the target nucleic acid but no less than 50% sequence identity to the segment of the target nucleic acid. Often, the segment of the target nucleic acid comprises a single nucleotide mutation as compared to at least one nucleic acid comprising less than 100% sequence identity to the segment of the target nucleic acid but no less than 50% sequence identity to the segment of the target nucleic acid.

[0372] The concentrations of the various reagents in the programmable nuclease DETECTR reaction mix can vary depending on the particular scale of the reaction. For example, the final concentration of the programmable nuclease can vary from 1 pM to 1 nM, from 1 pM to 10 pM, from 10 pM to 100 pM, from 100 pM to 1 nM, from 1 nM to 10 nM, from 10 nM to 20 nM, from 20 nM to 30 nM, from 30 nM to 40 nM, from 40 nM to 50 nM, from 50 nM to 60 nM, from 60 nM to 70 nM, from 70 nM to 80 nM, from 80 nM to 90 nM, from 90 nM to 100 nM, from 100 nM to 200 nM, from 200 nM to 300 nM, from 300 nM to 400 nM, from 400 nM to 500 nM, from 500 nM to 600 nM, from 600 nM to 700 nM, from 700 nM to 800 nM, from 800 nM to 900 nM, from 900 nM to 1000 nM. The final concentration of the sgRNA complementary to the target nucleic acid can be from 1 pM to 1 nM, from 1 pM to 10 pM, from 10 pM to 100 pM, from 100 pM to 1 nM, from 1 nM to 10 nM, from 10 nM to 20 nM, from 20 nM to 30 nM, from 30 nM to 40 nM, from 40 nM to 50 nM, from 50 nM to 60 nM, from 60 nM to 70 nM, from 70 nM to 80 nM, from 80 nM to 90 nM, from 90 nM to 100 nM, from 100 nM to 200 nM, from 200 nM to 300 nM, from 300 nM to 400 nM, from 400 nM to 500 nM, from 500 nM to 600 nM, from 600 nM to 700 nM, from 700 nM to 800 nM, from 800 nM to 900 nM, from 900 nM to 1000 nM. The concentration of the ssDNA-FQ reporter can be from 1 pM to 1 nM, from 1 pM to 10 pM, from 10 pM to 100 pM, from 100 pM to 1 nM, from 1 nM to 10 nM, from 10 nM to 20 nM, from 20 nM to 30 nM, from 30 nM to 40 nM, from 40 nM to 50 nM, from 50 nM to 60 nM, from 60 nM to 70 nM, from 70 nM to 80 nM, from 80 nM to 90 nM, from 90 nM to 100 nM, from 100 nM to 200 nM, from 200 nM to 300 nM, from 300 nM to 400 nM, from 400 nM to 500 nM, from 500 nM to 600 nM, from 600 nM to 700 nM, from 700 nM to 800 nM, from 800 nM to 900 nM, from 900 nM to 1000 nM.

[0373] An example of a DETECTR reaction comprises, consists, or consists essentially of a final concentration of 100 nM CasΦ polypeptide or variant thereof, 125 nM sgRNA, and 50 nM ssDNA-FQ reporter in a total reaction volume of 20 μL. Reactions are incubated in a fluorescence plate reader (Tecan Infinite Pro 200 M Plex) for 2 hours at 37° C. with fluorescence measurements taken every 30 seconds (e.g., λex: 485 nm; λem: 535 nm). The fluorescence wavelength detected can vary depending on the reporter molecule.

[0374] Described herein are reagents comprising a single stranded reporter nucleic acid comprising a detection moiety, wherein the reporter nucleic acid (e.g., the ssDNA-FQ reporter described above) is capable of being cleaved by the programmable nuclease, upon generation and amplification of ssDNA from a nucleic acid template using the methods disclosed herein, thereby generating a first detectable signal.

[0375] The methods disclosed herein, thus, include generation and amplification of ssDNA from a target nucleic acid template (e.g., cDNA, ssDNA, or dsDNA) of interest in a sample, incubation of the ssDNA with an ssDNA activated programmable nuclease leading to indiscriminate, PAM-independent cleavage of reporter nucleic acids (also referred to as ssDNA-FQ reporters) to generate a detectable signal, and quantification of the detectable signal to detect a target nucleic acid sequence of interest.

### Reporters

[0376] Described herein are reagents comprising a reporter. The reporter can comprise a single stranded nucleic acid and a detection moiety (e.g., a labeled single stranded DNA reporter), wherein the nucleic acid is capable of being cleaved by the activated programmable nuclease (e.g., a CasΦ as disclosed herein), releasing the detection moiety, and, generating a detectable signal. As used herein, “reporter” is used interchangeably with “reporter nucleic acid” or “reporter molecule”. The programmable nucleases disclosed herein, activated upon hybridization of a guide RNA to a target nucleic acid, can cleave the reporter. Cleaving the “reporter” may be referred to herein as cleaving the “reporter nucleic acid,” the “reporter molecule,” or the “nucleic acid of the reporter.”

[0377] A major advantage of the compositions and methods disclosed herein can be the design of excess reporters to total nucleic acids in an unamplified or an amplified sample, not including the nucleic acid of the reporter. Total nucleic acids can include the target nucleic acids and non-target nucleic acids, not including the nucleic acid of the reporter. The non-target nucleic acids can be from the original sample, either lysed or unlysed. The non-target nucleic acids can also be byproducts of amplification. Thus, the non-target nucleic acids can include both non-target nucleic acids from the original sample, lysed or unlysed, and from an amplified sample. The presence of a large amount of non-target nucleic acids, an activated programmable nuclease (e.g., a CasΦ as disclosed herein) may be inhibited in its ability to bind and cleave the reporter sequences. This is because the activated programmable nuclease collaterally cleaves any nucleic acids. If total nucleic acids are in present in large amounts, they may outcompete reporters for the programmable nucleases. The compositions and methods disclosed herein are designed to have an excess of reporter to total nucleic acids, such that the detectable signals from DETECTR reactions are particularly superior. In some embodiments, the reporter can be present in at least 1.5 fold, at least 2 fold, at least 3 fold, at least 4 fold, at least 5 fold, at least 6 fold, at least 7 fold, at least 8 fold, at least 9 fold, at least 10 fold, at least 11 fold, at least 12 fold, at least 13 fold, at least 14 fold, at least 15 fold, at least 16 fold, at least 17 fold, at least 18 fold, at least 19 fold, at least 20 fold, at least 30 fold, at least 40 fold, at least 50 fold, at least 60 fold, at least 70 fold, at least 80 fold, at least 90 fold, at least 100 fold, from 1.5 fold to 100 fold, from 2 fold to 10 fold, from 10 fold to 20 fold, from 20 fold to 30 fold, from 30 fold to 40 fold, from 40 fold to 50 fold, from 50 fold to 60 fold, from 60 fold to 70 fold, from 70 fold to 80 fold, from 80 fold to 90 fold, from 90 fold to 100 fold, from 1.5 fold to 10 fold, from 1.5 fold to 20 fold, from 10 fold to 40 fold, from 20 fold to 60 fold, or from 10 fold to 80 fold excess of total nucleic acids.

[0378] Another significant advantage of the compositions and methods disclosed herein can be the design of an excess volume comprising the guide nucleic acid, the programmable nuclease (e.g., a CasΦ as disclosed herein), and the reporter, which contacts a smaller volume comprising the sample with the target nucleic acid of interest. The smaller volume comprising the sample can be unlysed sample, lysed sample, or lysed sample which has undergone any combination of reverse transcription, amplification, and in vitro transcription. The presence of various reagents in a crude, non-lysed sample, a lysed sample, or a lysed and amplified sample, such as buffer, magnesium sulfate, salts, the pH, a reducing agent, primers, dNTPs, NTPs, cellular lysates, non-target nucleic acids, primers, or other components, can inhibit the ability of the programmable nuclease to become activated or to find and cleave the nucleic acid of the reporter. This may be due to nucleic acids that are not the reporter outcompeting the nucleic acid of the reporter, for the programmable nuclease. Alternatively, various reagents in the sample may simply inhibit the activity of the programmable nuclease. Thus, the compositions and methods provided herein for contacting an excess volume comprising the guide nucleic acid, the programmable nuclease, and the reporter to a smaller volume comprising the sample with the target nucleic acid of interest provides for superior detection of the target nucleic acid by ensuring that the programmable nuclease is able to find and cleaves the nucleic acid of the reporter. In some embodiments, the volume comprising the guide nucleic acid, the programmable nuclease, and the reporter (can be referred to as “a second volume”) is 4-fold greater than a volume comprising the sample (can be referred to as “a first volume”). In some embodiments, the volume comprising the guide nucleic acid, the programmable nuclease, and the reporter (can be referred to as “a second volume”) is at least 1.5 fold, at least 2 fold, at least 3 fold, at least 4 fold, at least 5 fold, at least 6 fold, at least 7 fold, at least 8 fold, at least 9 fold, at least 10 fold, at least 11 fold, at least 12 fold, at least 13 fold, at least 14 fold, at least 15 fold, at least 16 fold, at least 17 fold, at least 18 fold, at least 19 fold, at least 20 fold, at least 30 fold, at least 40 fold, at least 50 fold, at least 60 fold, at least 70 fold, at least 80 fold, at least 90 fold, at least 100 fold, from 1.5 fold to 100 fold, from 2 fold to 10 fold, from 10 fold to 20 fold, from 20 fold to 30 fold, from 30 fold to 40 fold, from 40 fold to 50 fold, from 50 fold to 60 fold, from 60 fold to 70 fold, from 70 fold to 80 fold, from 80 fold to 90 fold, from 90 fold to 100 fold, from 1.5 fold to 10 fold, from 1.5 fold to 20 fold, from 10 fold to 40 fold, from 20 fold to 60 fold, or from 10 fold to 80 fold greater than a volume comprising the sample (can be referred to as “a first volume”). In some embodiments, the volume comprising the sample is at least 0.5 μL, at least 1 μL, at least at least 1 μL, at least 2 μL, at least 3 μL, at least 4 μL, at least 5 μL, at least 6 μL, at least 7 μL, at least 8 μL, at least 9 μL, at least 10 μL, at least 11 μL, at least 12 μL, at least 13 μL, at least 14 μL, at least 15 μL, at least 16 μL, at least 17 μL, at least 18 μL, at least 19 μL, at least 20 μL, at least 25 μL, at least 30 μL, at least 35 μL, at least 40 μL, at least 45 μL, at least 50 μL, at least 55 μL, at least 60 μL, at least 65 μL, at least 70 μL, at least 75 μL, at least 80 μL, at least 85 μL, at least 90 μL, at least 95 μL, at least 100 μL, from 0.5 μL to 5 μL μL, from 5 μL to 10 μL, from 10 μL to 15 μL, from 15 μL to 20 μL, from 20 μL to 25 μL, from 25 μL to 30 μL, from 30 μL to 35 μL, from 35 μL to 40 μL, from 40 μL to 45 μL, from 45 μL to 50 μL, from 10 μL to 20 μL, from 5 μL to 20 μL, from 1 μL to 40 μL, from 2 μL to 10 μL, or from 1 μL to 10 μL. In some embodiments, the volume comprising the programmable nuclease, the guide nucleic acid, and the reporter is at least 10 μL, at least 11 μL, at least 12 μL, at least 13 μL, at least 14 μL, at least 15 μL, at least 16 μL, at least 17 μL, at least 18 μL, at least 19 μL, at least 20 μL, at least 21 μL, at least 22 μL, at least 23 μL, at least 24 μL, at least 25 μL, at least 26 μL, at least 27 μL, at least 28 μL, at least 29 μL, at least 30 μL, at least 40 μL, at least 50 μL, at least 60 μL, at least 70 μL, at least 80 μL, at least 90 μL, at least 100 μL, at least 150 μL, at least 200 μL, at least 250 μL, at least 300 μL, at least 350 μL, at least 400 μL, at least 450 μL, at least 500 μL, from 10 μL to 15 μL μL, from 15 μL to 20 μL, from 20 μL to 25 μL, from 25 μL to 30 μL, from 30 μL to 35 μL, from 35 μL to 40 μL, from 40 μL to 45 μL, from 45 μL to 50 μL, from 50 μL to 55 μL, from 55 μL to 60 μL, from 60 μL to 65 μL, from 65 μL to 70 μL, from 70 μL to 75 μL, from 75 μL to 80 μL, from 80 μL to 85 μL, from 85 μL to 90 μL, from 90 μL to 95 μL, from 95 μL to 100 μL, from 100 μL to 150 μL, from 150 μL to 200 μL, from 200 μL to 250 μL, from 250 μL to 300 μL, from 300 μL to 350 μL, from 350 μL to 400 μL, from 400 μL to 450 μL, from 450 μL to 500 μL, from 10 μL to 20 μL, from 10 μL to 30 μL, from 25 μL to 35 μL, from 10 μL to 40 μL, from 20 μL to 50 μL, from 18 μL to 28 μL, or from 17 μL to 22 μL.

[0379] In some cases, the reporter nucleic acid is a single-stranded nucleic acid sequence comprising deoxyribonucleotides. In other cases, the reporter nucleic acid is a single-stranded nucleic acid sequence comprising ribonucleotides. The nucleic acid of a reporter can be a single-stranded nucleic acid sequence comprising at least one deoxyribonucleotide and at least one ribonucleotide. In some cases, the nucleic acid of a reporter is a single-stranded nucleic acid comprising at least one ribonucleotide residue at an internal position that functions as a cleavage site. In some cases, the nucleic acid of a reporter comprises at least 2, 3, 4, 5, 6, 7, 8, 9, or 10 ribonucleotide residues at an internal position. In some cases, the nucleic acid of a reporter comprises from 2 to 10, from 3 to 9, from 4 to 8, or from 5 to 7 ribonucleotide residues at an internal position. Sometimes the ribonucleotide residues are continuous. Alternatively, the ribonucleotide residues are interspersed in between non-ribonucleotide residues. In some cases, the nucleic acid of a reporter has only ribonucleotide residues. In some cases, the nucleic acid of a reporter has only deoxyribonucleotide residues. In some cases, the nucleic acid comprises nucleotides resistant to cleavage by the programmable nuclease described herein. In some cases, the nucleic acid of a reporter comprises synthetic nucleotides. In some cases, the nucleic acid of a reporter comprises at least one ribonucleotide residue and at least one non-ribonucleotide residue. In some cases, the nucleic acid of a reporter is 5-20, 5-15, 5-10, 7-20, 7-15, or 7-10 nucleotides in length. In some cases, the nucleic acid of a reporter is from 3 to 20, from 4 to 10, from 5 to 10, or from 5 to 8 nucleotides in length. In some cases, the nucleic acid of a reporter comprises at least one uracil ribonucleotide. In some cases, the nucleic acid of a reporter comprises at least two uracil ribonucleotides. Sometimes the nucleic acid of a reporter has only uracil ribonucleotides. In some cases, the nucleic acid of a reporter comprises at least one adenine ribonucleotide. In some cases, the nucleic acid of a reporter comprises at least two adenine ribonucleotides. In some cases, the nucleic acid of a reporter has only adenine ribonucleotides. In some cases, the nucleic acid of a reporter comprises at least one cytosine ribonucleotide. In some cases, the nucleic acid of a reporter comprises at least two cytosine ribonucleotides. In some cases, the nucleic acid of a reporter comprises at least one guanine ribonucleotide. In some cases, the nucleic acid of a reporter comprises at least two guanine ribonucleotides. A nucleic acid of a reporter can comprise only unmodified ribonucleotides, only unmodified deoxyribonucleotides, or a combination thereof. In some cases, the nucleic acid of a reporter is from 5 to 12 nucleotides in length. In some cases, the reporter nucleic acid is at least 2, at least 3, at least 4, at least 5, at least 6, at least 7, at least 8, at least 9, at least 10, at least 11, at least 12, at least 13, at least 14, at least 15, at least 16, at least 17, at least 18, at least 19, at least 20, at least 21, at least 22, at least 23, at least 24, at least 25, at least 26, at least 27, at least 28, at least 29, or at least 30 nucleotides in length. In some cases, the reporter nucleic acid is 2, 3, 4, 5, 6, 7, 8, 9, 10, 11, 12, 13, 14, 15, 16, 17, 18, 19, 20, 21, 22, 23, 24, 25, 26, 27, 28, 29, or 30 nucleotides in length.

[0380] The single stranded nucleic acid of a reporter comprises a detection moiety capable of generating a first detectable signal. Sometimes the reporter nucleic acid comprises a protein capable of generating a signal. A signal can be a calorimetric, potentiometric, amperometric, optical (e.g., fluorescent, colorimetric, etc.), or piezo-electric signal. In some cases, a detection moiety is on one side of the cleavage site. Optionally, a quenching moiety is on the other side of the cleavage site. Sometimes the quenching moiety is a fluorescence quenching moiety. In some cases, the quenching moiety is 5′ to the cleavage site and the detection moiety is 3′ to the cleavage site. In some cases, the detection moiety is 5′ to the cleavage site and the quenching moiety is 3′ to the cleavage site. Sometimes the quenching moiety is at the 5′ terminus of the nucleic acid of a reporter. Sometimes the detection moiety is at the 3′ terminus of the nucleic acid of a reporter. In some cases, the detection moiety is at the 5′ terminus of the nucleic acid of a reporter. In some cases, the quenching moiety is at the 3′ terminus of the nucleic acid of a reporter. In some cases, the single-stranded nucleic acid of a reporter is at least one population of the single-stranded nucleic acid capable of generating a first detectable signal. In some cases, the single-stranded nucleic acid of a reporter is a population of the single stranded nucleic acid capable of generating a first detectable signal. Optionally, there is more than one population of single-stranded nucleic acid of a reporter. In some cases, there are 2, 3, 4, 5, 6, 7, 8, 9, 10, 11, 12, 13, 14, 15, 20, 30, 40, 50, or greater than 50, or any number spanned by the range of this list of different populations of single-stranded nucleic acids of a reporter capable of generating a detectable signal. In some cases, there are from 2 to 50, from 3 to 40, from 4 to 30, from 5 to 20, or from 6 to 10 different populations of single-stranded nucleic acids of a reporter capable of generating a detectable signal.

TABLE 3
Examples of Single Stranded Nucleic Acids in a Reporter

| 5′ Detection Moiety* | Sequence (SEQ ID NO) | 3′ Quencher* |
|---|---|---|
| /56-FAM/ | TTATTATT (SEQ ID NO: 95) | /3IABkFQ/ |
| /56-FAM/ | TTATTATT (SEQ ID NO: 95) | /3IABkFQ/ |
| /5IRD700/ | TTATTATT (SEQ ID NO: 95) | /3IRQC1N/ |
| /5TYE665/ | TTATTATT (SEQ ID NO: 95) | /3IAbRQSp/ |
| /5Alex594N/ | TTATTATT (SEQ ID NO: 95) | /3IAbRQSp/ |
| /5ATTO633N/ | TTATTATT (SEQ ID NO: 95) | /3IAbRQSp/ |
| /56-FAM/ | TTTTTT (SEQ ID NO: 96) | /3IABkFQ/ |
| /56-FAM/ | TTTTTTTT (SEQ ID NO: 97) | /3IABkFQ/ |
| /56-FAM/ | TTTTTTTTTT (SEQ ID NO: 98) | /3IABkFQ/ |
| /56-FAM/ | TTTTTTTTTTTT (SEQ ID NO: 99) | /3IABkFQ/ |
| /56-FAM/ | TTTTTTTTTTTTTT (SEQ ID NO: 100) | /3IABkFQ/ |
| /56-FAM/ | AAAAAA (SEQ ID NO: 101) | /3IABkFQ/ |
| /56-FAM/ | CCCCCC (SEQ ID NO: 102) | /3IABkFQ/ |
| /56-FAM/ | GGGGGG (SEQ ID NO: 103) | /3IABkFQ/ |
| /56-FAM/ | TTATTATT (SEQ ID NO: 104) | /3IABkFQ/ |

*This Table refers to the detection moiety and quencher moiety as their tradenames and their source is identified. However, alternatives, generics, or non-tradename moieties with similar function from other sources can also be used.
/56-FAM/: 5′ 6-Fluorescein (Integrated DNA Technologies)
/3IABkFQ/: 3′ Iowa Black FQ (Integrated DNA Technologies)
/5IRD700/: 5′ IRDye 700 (Integrated DNA Technologies)
/5TYE665/: 5′ TYE 665 (Integrated DNA Technologies)
/5Alex594N/: 5′ Alexa Fluor 594 (NHS Ester) (Integrated DNA Technologies)
/5ATTO633N/: 5′ ATTO TM 633 (NHS Ester) (Integrated DNA Technologies)
/3IRQC1N/: 3′ IRDye QC-1 Quencher (Li-Cor)
/3IAbRQSp/: 3′ Iowa Black RQ (Integrated DNA Technologies)

[0381] A detection moiety can be an infrared fluorophore. A detection moiety can be a fluorophore that emits fluorescence in the range of from 500 nm and 720 nm. A detection moiety can be a fluorophore that emits fluorescence in the range of from 500 nm and 720 nm. In some cases, the detection moiety emits fluorescence at a wavelength of 700 nm or higher. In other cases, the detection moiety emits fluorescence at about 660 nm or about 670 nm. In some cases, the detection moiety emits fluorescence in the range of from 500 to 520, 500 to 540, 500 to 590, 590 to 600, 600 to 610, 610 to 620, 620 to 630, 630 to 640, 640 to 650, 650 to 660, 660 to 670, 670 to 680, 690 to 690, 690 to 700, 700 to 710, 710 to 720, or 720 to 730 nm. In some cases, the detection moiety emits fluorescence in the range from 450 nm to 750 nm, from 500 nm to 650 nm, or from 550 to 650 nm. A detection moiety can be a fluorophore that emits a detectable fluorescence signal in the same range as 6-Fluorescein, IRDye 700, TYE 665, Alex Fluor, or ATTO TM 633 (NHS Ester). A detection moiety can be fluorescein amidite, 6-Fluorescein, IRDye 700, TYE 665, Alex Fluor 594, or ATTO TM 633 (NHS Ester). A detection moiety can be a fluorophore that emits a fluorescence in the same range as 6-Fluorescein (Integrated DNA Technologies), IRDye 700 (Integrated DNA Technologies), TYE 665 (Integrated DNA Technologies), Alex Fluor 594 (Integrated DNA Technologies), or ATTO TM 633 (NHS Ester) (Integrated DNA Technologies). A detection moiety can be fluorescein amidite, 6-Fluorescein (Integrated DNA Technologies), IRDye 700 (Integrated DNA Technologies), TYE 665 (Integrated DNA Technologies), Alex Fluor 594 (Integrated DNA Technologies), or ATTO TM 633 (NHS Ester) (Integrated DNA Technologies). Any of the detection moieties described herein can be from any commercially available source, can be an alternative with a similar function, a generic, or a non-tradename of the detection moieties listed.

[0382] A detection moiety can be chosen for use based on the type of sample to be tested. For example, a detection moiety that is an infrared fluorophore is used with a urine sample. As another example, SEQ ID NO: 87 with a fluorophore that emits a fluorescence around 520 nm is used for testing in non-urine samples, and SEQ ID NO: 94 with a fluorophore that emits a fluorescence around 700 nm is used for testing in urine samples.

[0383] A quenching moiety can be chosen based on its ability to quench the detection moiety. A quenching moiety can be a non-fluorescent fluorescence quencher. A quenching moiety can quench a detection moiety that emits fluorescence in the range of from 500 nm and 720 nm. A quenching moiety can quench a detection moiety that emits fluorescence in the range of from 500 nm and 720 nm. In some cases, the quenching moiety quenches a detection moiety that emits fluorescence at a wavelength of 700 nm or higher. In other cases, the quenching moiety quenches a detection moiety that emits fluorescence at about 660 nm or about 670 nm. In some cases, the quenching moiety quenches a detection moiety that emits fluorescence in the range of from 500 to 520, 500 to 540, 500 to 590, 590 to 600, 600 to 610, 610 to 620, 620 to 630, 630 to 640, 640 to 650, 650 to 660, 660 to 670, 670 to 680, 690 to 690, 690 to 700, 700 to 710, 710 to 720, or 720 to 730 nm. In some cases, the quenching moiety quenches a detection moiety that emits fluorescence in the range from 450 nm to 750 nm, from 500 nm to 650 nm, or from 550 to 650 nm. A quenching moiety can quench fluorescein amidite, 6-Fluorescein, IRDye 700, TYE 665, Alex Fluor 594, or ATTO TM 633 (NHS Ester). A quenching moiety can be Iowa Black RQ, Iowa Black FQ or IRDye QC-1 Quencher. A quenching moiety can quench fluorescein amidite, 6-Fluorescein (Integrated DNA Technologies), IRDye 700 (Integrated DNA Technologies), TYE 665 (Integrated DNA Technologies), Alex Fluor 594 (Integrated DNA Technologies), or ATTO TM 633 (NHS Ester) (Integrated DNA Technologies). A quenching moiety can be Iowa Black RQ (Integrated DNA Technologies), Iowa Black FQ (Integrated DNA Technologies) or IRDye QC-1 Quencher (LiCor). Any of the quenching moieties described herein can be from any commercially available source, can be an alternative with a similar function, a generic, or a non-tradename of the quenching moieties listed.

[0384] The generation of the detectable signal from the release of the detection moiety indicates that cleavage by the programmable nucleases has occurred and that the sample contains the target nucleic acid. In some cases, the detection moiety comprises a fluorescent dye. Sometimes the detection moiety comprises a fluorescence resonance energy transfer (FRET) pair. In some cases, the detection moiety comprises an infrared (IR) dye. In some cases, the detection moiety comprises an ultraviolet (UV) dye. Alternatively or in combination, the detection moiety comprises a polypeptide. Sometimes the detection moiety comprises a biotin. Sometimes the detection moiety comprises at least one of avidin or streptavidin. In some instances, the detection moiety comprises a polysaccharide, a polymer, or a nanoparticle. In some instances, the detection moiety comprises a gold nanoparticle or a latex nanoparticle.

[0385] A detection moiety can be any moiety capable of generating a calorimetric, potentiometric, amperometric, optical (e.g., fluorescent, colorimetric, etc.), or piezo-electric signal. A nucleic acid of a reporter, sometimes, is protein-nucleic acid that is capable of generating a calorimetric, potentiometric, amperometric, optical (e.g., fluorescent, colorimetric, etc.), or piezo-electric signal upon cleavage of the nucleic acid. Often a calorimetric signal is heat produced after cleavage of the nucleic acids of a reporter. Sometimes, a calorimetric signal is heat absorbed after cleavage of the nucleic acids of a reporter. A potentiometric signal, for example, is electrical potential produced after cleavage of the nucleic acids of a reporter. An amperometric signal can be movement of electrons produced after the cleavage of nucleic acid of a reporter. Often, the signal is an optical signal, such as a colorimetric signal or a fluorescence signal. An optical signal is, for example, a light output produced after the cleavage of the nucleic acids of a reporter. Sometimes, an optical signal is a change in light absorbance between before and after the cleavage of nucleic acids of a reporter. Often, a piezo-electric signal is a change in mass between before and after the cleavage of the nucleic acid of a reporter.

[0386] The detectable signal can be a colorimetric signal or a signal visible by eye. In some instances, the detectable signal can be fluorescent, electrical, chemical, electrochemical, or magnetic. In some cases, the first detection signal can be generated by binding of the detection moiety to the capture molecule in the detection region, where the first detection signal indicates that the sample contained the target nucleic acid. Sometimes the system can be capable of detecting more than one type of target nucleic acid, wherein the system comprises more than one type of guide nucleic acid and more than one type of reporter nucleic acid. In some cases, the detectable signal can be generated directly by the cleavage event. Alternatively or in combination, the detectable signal can be generated indirectly by the signal event. Sometimes the detectable signal is not a fluorescent signal. In some instances, the detectable signal can be a colorimetric or color-based signal. In some cases, the detected target nucleic acid can be identified based on its spatial location on the detection region of the support medium. In some cases, the second detectable signal can be generated in a spatially distinct location than the first generated signal.

[0387] Often, the protein-nucleic acid is an enzyme-nucleic acid. The enzyme may be sterically hindered when present as in the enzyme-nucleic acid, but then functional upon cleavage from the nucleic acid. Often, the enzyme is an enzyme that produces a reaction with a substrate. An enzyme can be invertase. Often, the substrate of invertase is sucrose. A DNS reagent produces a colorimetric change when invertase converts sucrose to glucose. In some cases, it is preferred that the nucleic acid (e.g., DNA) and invertase are conjugated using a heterobifunctional linker via sulfo-SMCC chemistry. Sometimes the protein-nucleic acid is a substrate-nucleic acid. Often the substrate is a substrate that produces a reaction with an enzyme.

[0388] A protein-nucleic acid may be attached to a solid support. The solid support, for example, is a surface. A surface can be an electrode. Sometimes the solid support is a bead. Often the bead is a magnetic bead. Upon cleavage, the protein is liberated from the solid and interacts with other mixtures. For example, the protein is an enzyme, and upon cleavage of the nucleic acid of the enzyme-nucleic acid, the enzyme flows through a chamber into a mixture comprising the substrate. When the enzyme meets the enzyme substrate, a reaction occurs, such as a colorimetric reaction, which is then detected. As another example, the protein is an enzyme substrate, and upon cleavage of the nucleic acid of the enzyme substrate-nucleic acid, the enzyme flows through a chamber into a mixture comprising the enzyme. When the enzyme substrate meets the enzyme, a reaction occurs, such as a calorimetric reaction, which is then detected.

[0389] Often, the signal is a colorimetric signal or a signal visible by eye. In some instances, the signal is fluorescent, electrical, chemical, electrochemical, or magnetic. A signal can be a calorimetric, potentiometric, amperometric, optical (e.g., fluorescent, colorimetric, etc.), or piezo-electric signal. In some cases, the detectable signal is a colorimetric signal or a signal visible by eye. In some instances, the detectable signal is fluorescent, electrical, chemical, electrochemical, or magnetic. In some cases, the first detection signal is generated by binding of the detection moiety to the capture molecule in the detection region, where the first detection signal indicates that the sample contained the target nucleic acid. Sometimes the system is capable of detecting more than one type of target nucleic acid, wherein the system comprises more than one type of guide nucleic acid and more than one type of nucleic acid of a reporter. In some cases, the detectable signal is generated directly by the cleavage event. Alternatively or in combination, the detectable signal is generated indirectly by the signal event. Sometimes the detectable signal is not a fluorescent signal. In some instances, the detectable signal is a colorimetric or color-based signal. In some cases, the detected target nucleic acid is identified based on its spatial location on the detection region of the support medium. In some cases, the second detectable signal is generated in a spatially distinct location than the first generated signal.

[0390] In some cases, the threshold of detection, for a subject method of detecting a single stranded target nucleic acid in a sample, is less than or equal to 10 nM. The term “threshold of detection” is used herein to describe the minimal amount of target nucleic acid that must be present in a sample in order for detection to occur. For example, when a threshold of detection is 10 nM, then a signal can be detected when a target nucleic acid is present in the sample at a concentration of 10 nM or more. In some cases, the threshold of detection is less than or equal to 5 nM, 1 nM, 0.5 nM, 0.1 nM, 0.05 nM, 0.01 nM, 0.005 nM, 0.001 nM, 0.0005 nM, 0.0001 nM, 0.00005 nM, 0.00001 nM, 10 pM, 1 pM, 500 fM, 250 fM, 100 fM, 50 fM, 10 fM, 5 fM, 1 fM, 500 attomole (aM), 100 aM, 50 aM, 10 aM, or 1 aM. In some cases, the threshold of detection is in a range of from 1 aM to 1 nM, 1 aM to 500 pM, 1 aM to 200 pM, 1 aM to 100 pM, 1 aM to 10 pM, 1 aM to 1 pM, 1 aM to 500 fM, 1 aM to 100 fM, 1 aM to 1 fM, 1 aM to 500 aM, 1 aM to 100 aM, 1 aM to 50 aM, 1 aM to 10 aM, 10 aM to 1 nM, 10 aM to 500 pM, 10 aM to 200 pM, 10 aM to 100 pM, 10 aM to 10 pM, 10 aM to 1 pM, 10 aM to 500 fM, 10 aM to 100 fM, 10 aM to 1 fM, 10 aM to 500 aM, 10 aM to 100 aM, 10 aM to 50 aM, 100 aM to 1 nM, 100 aM to 500 pM, 100 aM to 200 pM, 100 aM to 100 pM, 100 aM to 10 pM, 100 aM to 1 pM, 100 aM to 500 fM, 100 aM to 100 fM, 100 aM to 1 fM, 100 aM to 500 aM, 500 aM to 1 nM, 500 aM to 500 pM, 500 aM to 200 pM, 500 aM to 100 pM, 500 aM to 10 pM, 500 aM to 1 pM, 500 aM to 500 fM, 500 aM to 100 fM, 500 aM to 1 fM, 1 fM to 1 nM, 1 fM to 500 pM, 1 fM to 200 pM, 1 fM to 100 pM, 1 fM to 10 pM, 1 fM to 1 pM, 10 fM to 1 nM, 10 fM to 500 pM, 10 fM to 200 pM, 10 fM to 100 pM, 10 fM to 10 pM, 10 fM to 1 pM, 500 fM to 1 nM, 500 fM to 500 pM, 500 fM to 200 pM, 500 fM to 100 pM, 500 fM to 10 pM, 500 fM to 1 pM, 800 fM to 1 nM, 800 fM to 500 pM, 800 fM to 200 pM, 800 fM to 100 pM, 800 fM to 10 pM, 800 fM to 1 pM, 1 pM to 1 nM, 1 pM to 500 pM, 1 pM to 200 pM, 1 pM to 100 pM, or 1 pM to 10 pM. In some cases, the threshold of detection in a range of from 800 fM to 100 pM, 1 pM to 10 pM, 10 fM to 500 fM, 10 fM to 50 fM, 50 fM to 100 fM, 100 fM to 250 fM, or 250 fM to 500 fM. In some cases the threshold of detection is in a range of from 2 aM to 100 pM, from 20 aM to 50 pM, from 50 aM to 20 pM, from 200 aM to 5 pM, or from 500 aM to 2 pM. In some cases, the minimum concentration at which a single stranded target nucleic acid is detected in a sample is in a range of from 1 aM to 1 nM, 10 aM to 1 nM, 100 aM to 1 nM, 500 aM to 1 nM, 1 fM to 1 nM, 1 fM to 500 pM, 1 fM to 200 pM, 1 fM to 100 pM, 1 fM to 10 pM, 1 fM to 1 pM, 10 fM to 1 nM, 10 fM to 500 pM, 10 fM to 200 pM, 10 fM to 100 pM, 10 fM to 10 pM, 10 fM to 1 pM, 500 fM to 1 nM, 500 fM to 500 pM, 500 fM to 200 pM, 500 fM to 100 pM, 500 fM to 10 pM, 500 fM to 1 pM, 800 fM to 1 nM, 800 fM to 500 pM, 800 fM to 200 pM, 800 fM to 100 pM, 800 fM to 10 pM, 800 fM to 1 pM, 1 pM to 1 nM, 1 pM to 500 pM, from 1 pM to 200 pM, 1 pM to 100 pM, or 1 pM to 10 pM. In some cases, the minimum concentration at which a single stranded target nucleic acid is detected in a sample is in a range of from 2 aM to 100 pM, from 20 aM to 50 pM, from 50 aM to 20 pM, from 200 aM to 5 pM, or from 500 aM to 2 pM. In some cases, the minimum concentration at which a single stranded target nucleic acid can be detected in a sample is in a range of from 1 aM to 100 pM. In some cases, the minimum concentration at which a single stranded target nucleic acid can be detected in a sample is in a range of from 1 fM to 100 pM. In some cases, the minimum concentration at which a single stranded target nucleic acid can be detected in a sample is in a range of from 10 fM to 100 pM. In some cases, the minimum concentration at which a single stranded target nucleic acid can be detected in a sample is in a range of from 800 fM to 100 pM. In some cases, the minimum concentration at which a single stranded target nucleic acid can be detected in a sample is in a range of from 1 pM to 10 pM. In some cases, the devices, systems, fluidic devices, kits, and methods described herein detect a target single-stranded nucleic acid in a sample comprising a plurality of nucleic acids such as a plurality of non-target nucleic acids, where the target single-stranded nucleic acid is present at a concentration as low as 1 aM, 10 aM, 100 aM, 500 aM, 1 fM, 10 fM, 500 fM, 800 fM, 1 pM, 10 pM, 100 pM, or 1 pM.

[0391] In some embodiments, the target nucleic acid is present in the cleavage reaction at a concentration of about 10 nM, about 20 nM, about 30 nM, about 40 nM, about 50 nM, about 60 nM, about 70 nM, about 80 nM, about 90 nM, about 100 nM, about 200 nM, about 300 nM, about 400 nM, about 500 nM, about 600 nM, about 700 nM, about 800 nM, about 900 nM, about 1 μM, about 10 μM, or about 100 μM. In some embodiments, the target nucleic acid is present in the cleavage reaction at a concentration of from 10 nM to 20 nM, from 20 nM to 30 nM, from 30 nM to 40 nM, from 40 nM to 50 nM, from 50 nM to 60 nM, from 60 nM to 70 nM, from 70 nM to 80 nM, from 80 nM to 90 nM, from 90 nM to 100 nM, from 100 nM to 200 nM, from 200 nM to 300 nM, from 300 nM to 400 nM, from 400 nM to 500 nM, from 500 nM to 600 nM, from 600 nM to 700 nM, from 700 nM to 800 nM, from 800 nM to 900 nM, from 900 nM to 1 μM, from 1 μM to 10 μM, from 10 μM to 100 μM, from 10 nM to 100 nM, from 10 nM to 1 μM, from 10 nM to 10 pM, from 10 nM to 100 μM, from 100 nM to 1 μM, from 100 nM to 10 μM, from 100 nM to 100 μM, or from 1 μM to 100 μM. In some embodiments, the target nucleic acid is present in the cleavage reaction at a concentration of from 20 nM to 50 μM, from 50 nM to 20 μM, or from 200 nM to 5 μM.

[0392] In some cases, the methods, compositions, reagents, enzymes, and kits described herein may be used to detect a target single-stranded nucleic acid in a sample where the sample is contacted with the reagents for a predetermined length of time sufficient for the trans-cleavage to occur or cleavage reaction to reach completion. In some cases, the devices, systems, fluidic devices, kits, and methods described herein detect a target single-stranded nucleic acid in a sample where the sample is contacted with the reagents for no greater than 60 minutes. Sometimes the sample is contacted with the reagents for no greater than 120 minutes, 110 minutes, 100 minutes, 90 minutes, 80 minutes, 70 minutes, 60 minutes, 55 minutes, 50 minutes, 45 minutes, 40 minutes, 35 minutes, 30 minutes, 25 minutes, 20 minutes, 15 minutes, 10 minutes, 5 minutes, 4 minutes, 3 minutes, 2 minutes, or 1 minute. Sometimes the sample is contacted with the reagents for at least 120 minutes, 110 minutes, 100 minutes, 90 minutes, 80 minutes, 70 minutes, 60 minutes, 55 minutes, 50 minutes, 45 minutes, 40 minutes, 35 minutes, 30 minutes, 25 minutes, 20 minutes, 15 minutes, 10 minutes, or 5 minutes. In some cases, the sample is contacted with the reagents for from 5 minutes to 120 minutes, from 5 minutes to 100 minutes, from 10 minutes to 90 minutes, from 15 minutes to 45 minutes, or from 20 minutes to 35 minutes. In some cases, the devices, systems, fluidic devices, kits, and methods described herein can detect a target nucleic acid in a sample in less than 10 hours, less than 9 hours, less than 8 hours, less than 7 hours, less than 6 hours, less than 5 hours, less than 4 hours, less than 3 hours, less than 2 hours, less than 1 hour, less than 50 minutes, less than 45 minutes, less than 40 minutes, less than 35 minutes, less than 30 minutes, less than 25 minutes, less than 20 minutes, less than 15 minutes, less than 10 minutes, less than 9 minutes, less than 8 minutes, less than 7 minutes, less than 6 minutes, or less than 5 minutes. In some cases, the devices, systems, fluidic devices, kits, and methods described herein can detect a target nucleic acid in a sample in from 5 minutes to 10 hours, from 10 minutes to 8 hours, from 15 minutes to 6 hours, from 20 minutes to 5 hours, from 30 minutes to 2 hours, or from 45 minutes to 1 hour.

[0393] When a guide nucleic acid binds to a target nucleic acid, the programmable nuclease's trans-cleavage activity can be initiated, and nucleic acids of a reporter can be cleaved, resulting in the detection of fluorescence. The guide nucleic acid may be a non-naturally occurring guide nucleic acid. A non-naturally occurring guide nucleic acid may comprise an engineered sequence having a repeat and a spacer that hybridizes to a target nucleic acid sequence of interest. A non-naturally occurring guide nucleic acid may be recombinantly expressed or chemically synthesized. Nucleic acid reporters can comprise a detection moiety, wherein the nucleic acid reporter can be cleaved by the activated programmable nuclease, thereby generating a signal. Some methods as described herein can a method of assaying for a target nucleic acid in a sample comprises contacting the sample to a complex comprising a guide nucleic acid comprising a segment that is reverse complementary to a segment of the target nucleic acid and a programmable nuclease that exhibits sequence independent cleavage upon forming a complex comprising the segment of the guide nucleic acid binding to the segment of the target nucleic acid; and assaying for a signal indicating cleavage of at least some protein-nucleic acids of a population of protein-nucleic acids, wherein the signal indicates a presence of the target nucleic acid in the sample and wherein absence of the signal indicates an absence of the target nucleic acid in the sample. The cleaving of the nucleic acid of a reporter using the programmable nuclease may cleave with an efficiency of 50% as measured by a change in a signal that is calorimetric, potentiometric, amperometric, optical (e.g., fluorescent, colorimetric, etc.), or piezo-electric, as non-limiting examples. Some methods as described herein can be a method of detecting a target nucleic acid in a sample comprising contacting the sample comprising the target nucleic acid with a guide nucleic acid targeting a target nucleic acid segment, a programmable nuclease capable of being activated when complexed with the guide nucleic acid and the target nucleic acid segment, a single stranded nucleic acid of a reporter comprising a detection moiety, wherein the nucleic acid of a reporter is capable of being cleaved by the activated programmable nuclease, thereby generating a first detectable signal, cleaving the single stranded nucleic acid of a reporter using the programmable nuclease that cleaves as measured by a change in color, and measuring the first detectable signal on the support medium. The cleaving of the single stranded nucleic acid of a reporter using the programmable nuclease may cleave with an efficiency of 50% as measured by a change in color. In some cases, the cleavage efficiency is at least 40%, 50%, 60%, 70%, 80%, 90%, or 95% as measured by a change in color. The change in color may be a detectable colorimetric signal or a signal visible by eye. The change in color may be measured as a first detectable signal. The first detectable signal can be detectable within 5 minutes of contacting the sample comprising the target nucleic acid with a guide nucleic acid targeting a target nucleic acid segment, a programmable nuclease capable of being activated when complexed with the guide nucleic acid and the target nucleic acid segment, and a single stranded nucleic acid of a reporter comprising a detection moiety, wherein the nucleic acid of a reporter is capable of being cleaved by the activated nuclease. The first detectable signal can be detectable within 1, 2, 3, 4, 5, 6, 7, 8, 9, 10, 11, 12, 13, 14, 15, 20, 25, 30, 35, 40, 45, 50, 55, 60, 70, 80, 90, 100, 110, or 120 minutes of contacting the sample. In some embodiments, the first detectable signal can be detectable within from 1 to 120, from 5 to 100, from 10 to 90, from 15 to 80, from 20 to 60, or from 30 to 45 minutes of contacting the sample.

[0394] In some cases, the methods, reagents, enzymes, and kits described herein detect a target single-stranded nucleic acid with a programmable nuclease and a single-stranded nucleic acid of a reporter in a sample where the sample is contacted with the reagents for a predetermined length of time sufficient for trans-cleavage of the single stranded nucleic acid of a reporter.

[0395] Some methods as described herein can be a method of detecting a target nucleic acid in a sample comprising contacting the sample comprising the target nucleic acid with a guide nucleic acid targeting a target sequence, a programmable nuclease capable of being activated when complexed with the guide nucleic acid and the target sequence, a single stranded reporter nucleic acid comprising a detection moiety, wherein the reporter nucleic acid is capable of being cleaved by the activated nuclease, thereby generating a first detectable signal, cleaving the single stranded reporter nucleic acid using the programmable nuclease that cleaves as measured by a change in color, and measuring the first detectable signal on the support medium. The cleaving of the single stranded reporter nucleic acid using the programmable nuclease may cleave with an efficiency of 50% as measured by a change in color. In some cases, the cleavage efficiency is at least 40%, at least 50%, at least 60%, at least 70%, at least 80%, at least 90%, or at least 95% as measured by a change in color. The change in color may be a detectable colorimetric signal or a signal visible by eye. The change in color may be measured as a first detectable signal. The first detectable signal can be detectable within 5 minutes of contacting the sample comprising the target nucleic acid with a guide nucleic acid targeting a target sequence, a programmable nuclease capable of being activated when complexed with the guide nucleic acid and the target sequence, and a single stranded reporter nucleic acid comprising a detection moiety, wherein the reporter nucleic acid is capable of being cleaved by the activated nuclease. The first detectable signal can be detectable within 1, 2, 3, 4, 5, 6, 7, 8, 9, 10, 11, 12, 13, 14, 15, 20, 25, 30, 35, 40, 45, 50, 55, 60, 70, 80, 90, 100, 110, or 120 minutes of contacting the sample.

### Multiplexing Programmable Nucleases and Programmable Nickases

[0396] Described herein are compositions comprising a programmable nuclease (e.g., a CasΦ as disclosed herein) capable of being activated when complexed with the guide nucleic acid and the target nucleic acid molecule. Furthermore, these reagents can be used with different types of programmable nuclease, e.g., for multiplexing programmable nucleases. In some embodiments, the programmable nucleases can exist in RNP complexes that target multiple genes simultaneously. In some embodiments, a programmable nickase may be multiplexed with an additional programmable nuclease. For example, a programmable nickase may be multiplexed with an additional programmable nuclease for modification or detection of a target nucleic acid. In some embodiments, a first programmable nickase may be multiplexed with a second programmable nickase. In some embodiments, the programmable nickase may be a CasΦ programmable nickase.

[0397] In some embodiments, a CasΦ polypeptide disclosed herein may be multiplexed with multiple guide nucleic acids in the same sample, wherein the guide nucleic acids may comprise different sequences.

[0398] In some embodiments, an additional programmable nuclease used in multiplexing is any suitable programmable nuclease. Sometimes, the programmable nuclease is any Cas protein (also referred to as a Cas nuclease herein). In some cases, the programmable nuclease is Cas13. In some embodiments, the Cas13 is Cas13a, Cas13b, Cas13c, Cas13d, or Cas13e. In some cases, the programmable nuclease can be Mad7 or Mad2. In some cases, the programmable nuclease is a Cas12 protein. Sometimes the Cas12 is Cas12a, Cas12b, Cas12c, Cas12d, Cas12e, Cas12g, Cas12h, or Cas12i. In some cases, the programmable nuclease is another CasΦ protein. In some cases, the programmable nuclease is Csm1, Cas9, C2c4, C2c8, C2c5, C2c10, C2c9, or CasZ. Sometimes, the Csm1 can be also called smCms1, miCms1, obCms1, or suCms1. Sometimes CasZ can be also called Cas14a, Cas14b, Cas14c, Cas14d, Cas14e, Cas14f, Cas14g, or Cas14h. Sometimes, the programmable nuclease can be a type V CRISPR-Cas system. In some cases, the programmable nuclease can be a type VI CRISPR-Cas system. Sometimes the programmable nuclease can be a type III CRISPR-Cas system.

[0399] In some cases, an additional programmable nuclease used in multiplexing can be from, for example, Leptotrichia shahii (Lsh), Listeria seeligeri (Lse), Leptotrichia buccalis (Lbu), Leptotrichia wadeu (Lwa), Rhodobacter capsulatus (Rca), Herbinix hemicellulosilytica (Hhe), Paludibacter propionicigenes (Ppr), Lachnospiraceae bacterium (Lba), Eubacterium rectale (Ere), Listeria newyorkensis (Lny), Clostridium aminophilum (Cam), Prevotella sp. (Psm), Capnocytophaga canimorsus (Cca, Lachnospiraceae bacterium (Lba), Bergeyella zoohelcum (Bzo), Prevotella intermedia (Pin), Prevotella buccae (Pbu), Alistipes sp. (Asp), Riemerella anatipestifer (Ran), Prevotella aurantiaca (Pau), Prevotella saccharolytica (Psa), Prevotella intermedia (Pin2), Capnocytophaga canimorsus (Cca), Porphyromonas gulae (Pgu), Prevotella sp. (Psp), Porphyromonas gingivalis (Pig), Prevotella intermedia (Pin3), Enterococcus italicus (Ei), Lactobacillus salivarius (Ls), or Thermus thermophilus (Tt). In some cases, an additional programmable nuclease used in multiplexing can be from, for example, a phage such as a bacteriophage also called a megaphage. The nucleases may come from a particular bacteriophage clade called Biggiephage. Any combination of programmable nucleases can be used in multiplexing. In some embodiments, multiplexing of programmable nucleases takes place in one reaction volume. In other embodiments, multiplexing of programmable nucleases takes place in separate reaction volumes in a single device.

### Amplification of a Target Nucleic Acid

[0400] Disclosed herein are methods of amplifying a target nucleic acid for detection using any of the methods, reagents, kits or devices described herein. The compositions for amplification of target nucleic acids and methods of use thereof, as described herein, are compatible with the DETECTR assay methods disclosed herein. The compositions for amplification of target nucleic acids and methods of use thereof, as described herein, are compatible with any of the programmable nucleases disclosed herein and use of said programmable nuclease in a method of detecting a target nucleic acid. A target nucleic acid can be an amplified nucleic acid of interest. The nucleic acid of interest may be any nucleic acid disclosed herein or from any sample as disclosed herein. This amplification can be thermal amplification (e.g., using PCR) or isothermal amplification. This nucleic acid amplification of the sample can improve at least one of sensitivity, specificity, or accuracy of the detection the target nucleic acid. The reagents for nucleic acid amplification can comprise a recombinase, an oligonucleotide primer, a single-stranded DNA binding (SSB) protein, and a polymerase. The nucleic acid amplification can be transcription mediated amplification (TMA). Nucleic acid amplification can be helicase dependent amplification (HDA) or circular helicase dependent amplification (cHDA). In additional cases, nucleic acid amplification is strand displacement amplification (SDA). The nucleic acid amplification can be recombinase polymerase amplification (RPA). The nucleic acid amplification can be at least one of loop mediated amplification (LAMP) or the exponential amplification reaction (EXPAR). Nucleic acid amplification is, in some cases, by rolling circle amplification (RCA), ligase chain reaction (LCR), simple method amplifying RNA targets (SMART), single primer isothermal amplification (SPIA), multiple displacement amplification (MDA), nucleic acid sequence based amplification (NASBA), hinge-initiated primer-dependent amplification of nucleic acids (HIP), nicking enzyme amplification reaction (NEAR), or improved multiple displacement amplification (IMDA). The nucleic acid amplification can be performed for no greater than 1, 2, 3, 4, 5, 6, 7, 8, 9, 10, 11, 12, 13, 14, 15, 16, 17, 18, 19, 20, 25, 30, 40, 50, or 60 minutes. Sometimes, the nucleic acid amplification reaction is performed at a temperature of around 20-45° C. The nucleic acid amplification reaction can be performed at a temperature no greater than 20° C., 25° C., 30° C., 35° C., 37° C., 40° C., 45° C. The nucleic acid amplification reaction can be performed at a temperature of at least 20° C., 25° C., 30° C., 35° C., 37° C., 40° C., or 45° C.

[0401] The compositions for amplification of target nucleic acids and methods of use thereof, as described herein, are compatible with any of the compositions comprising a programmable nuclease and a buffer, which has been developed to improve the function of the programmable nuclease and use of said compositions in a method of detecting a target nucleic acid. The compositions for amplification of target nucleic acids and methods of use thereof, as described herein, are compatible with any of the methods disclosed herein including methods of assaying for at least one base difference (e.g., assaying for a SNP or a base mutation) in a target nucleic acid sequence, methods of assaying for a target nucleic acid that lacks a PAM by amplifying the target nucleic acid sequence to introduce a PAM, and compositions used in introducing a PAM via amplification into the target nucleic acid sequence. In some cases, amplification of the target nucleic acid may increase the sensitivity of a detection reaction. In some cases, amplification of the target nucleic acid may increase the specificity of a detection reaction. Amplification of the target nucleic acid may increase the concentration of the target nucleic acid in the sample relative to the concentration of nucleic acids that do not correspond to the target nucleic acid. In some embodiments, amplification of the target nucleic acid may be used to modify the sequence of the target nucleic acid. For example, amplification may be used to insert a PAM sequence into a target nucleic acid that lacks a PAM sequence. In some cases, amplification may be used to increase the homogeneity of a target nucleic acid sequence. For example, amplification may be used to remove a nucleic acid variation that is not of interest in the target nucleic acid sequence.

[0402] An amplified target nucleic acid may be present in a DETECTR reaction in an amount relative to an amount of a programmable nuclease. In some embodiments, the amplified target nucleic acid is present in at least 1-fold, 2-fold, 3-fold, 4-fold, 5-fold, 10-fold, 25-fold, 50-fold, 100-fold, 500-fold, 1000-fold, 10,000-fold, or 100,000-fold molar excess relative to the amount of the programmable nuclease. In some embodiments, the amplified target nucleic acid is present in no more than 1-fold, 2-fold, 3-fold, 4-fold, 5-fold, 10-fold, 25-fold, 50-fold, 100-fold, 500-fold, 1000-fold, 10,000-fold, or 100,000-fold molar excess relative to the amount of the programmable nuclease. In some embodiments, the amplified target nucleic acid is present in from 1-fold to 2-fold, from 1-fold to 3-fold, from 1-fold to 4-fold, from 1-fold to 5-fold, from 1-fold to 10-fold, from 1-fold to 25-fold, from 1-fold to 50-fold, from 1-fold to 100-fold, from 1-fold to 500-fold, from 1-fold to 1000-fold, from 1-fold to 10,000-fold, from 1-fold to 100,000-fold, from 5-fold to 10-fold, from 5-fold to 25-fold, from 5-fold to 50-fold, from 5-fold to 100-fold, from 5-fold to 500-fold, from 5-fold to 1000-fold, from 5-fold to 10,000-fold, from 5-fold to 100,000-fold, from 10-fold to 25-fold, from 10-fold to 50-fold, from 10-fold to 100-fold, from 10-fold to 500-fold, from 10-fold to 1000-fold, from 10-fold to 10,000-fold, from 10-fold to 100,000-fold, from 100-fold to 500-fold, from 100-fold to 1000-fold, from 100-fold to 10,000-fold, from 100-fold to 100,000-fold, from 1000-fold to 10,000-fold, from 1000-fold to 100,000-fold, or from 10,000-fold to 100,000-fold molar excess relative to the amount of the programmable nuclease. In some embodiments, the programmable nuclease is present in at least 1-fold, 2-fold, 3-fold, 4-fold, 5-fold, 10-fold, 25-fold, 50-fold, 100-fold, 500-fold, 1000-fold, 10,000-fold, or 100,000-fold molar excess relative to the amount of the target nucleic acid. In some embodiments, the programmable nuclease is present in no more than 1-fold, 2-fold, 3-fold, 4-fold, 5-fold, 10-fold, 25-fold, 50-fold, 100-fold, 500-fold, 1000-fold, 10,000-fold, or 100,000-fold molar excess relative to the amount of the target nucleic acid. In some embodiments, the programmable nuclease is present in from 1-fold to 2-fold, from 1-fold to 3-fold, from 1-fold to 4-fold, from 1-fold to 5-fold, from 1-fold to 10-fold, from 1-fold to 25-fold, from 1-fold to 50-fold, from 1-fold to 100-fold, from 1-fold to 500-fold, from 1-fold to 1000-fold, from 1-fold to 10,000-fold, from 1-fold to 100,000-fold, from 5-fold to 10-fold, from 5-fold to 25-fold, from 5-fold to 50-fold, from 5-fold to 100-fold, from 5-fold to 500-fold, from 5-fold to 1000-fold, from 5-fold to 10,000-fold, from 5-fold to 100,000-fold, from 10-fold to 25-fold, from 10-fold to 50-fold, from 10-fold to 100-fold, from 10-fold to 500-fold, from 10-fold to 1000-fold, from 10-fold to 10,000-fold, from 10-fold to 100,000-fold, from 100-fold to 500-fold, from 100-fold to 1000-fold, from 100-fold to 10,000-fold, from 100-fold to 100,000-fold, from 1000-fold to 10,000-fold, from 1000-fold to 100,000-fold, or from 10,000-fold to 100,000-fold molar excess relative to the amount of the target nucleic acid. In some embodiments, the target nucleic acid is not present in the sample.

[0403] An amplified target nucleic acid may be present in a DETECTR reaction in an amount relative to an amount of a guide nucleic acid. In some embodiments, the amplified target nucleic acid is present in at least 1-fold, 2-fold, 3-fold, 4-fold, 5-fold, 10-fold, 25-fold, 50-fold, 100-fold, 500-fold, 1000-fold, 10,000-fold, or 100,000-fold molar excess relative to the amount of the guide nucleic acid. In some embodiments, the amplified target nucleic acid is present in no more than 1-fold, 2-fold, 3-fold, 4-fold, 5-fold, 10-fold, 25-fold, 50-fold, 100-fold, 500-fold, 1000-fold, 10,000-fold, or 100,000-fold molar excess relative to the amount of the guide nucleic acid. In some embodiments, the amplified target nucleic acid is present in from 1-fold to 2-fold, from 1-fold to 3-fold, from 1-fold to 4-fold, from 1-fold to 5-fold, from 1-fold to 10-fold, from 1-fold to 25-fold, from 1-fold to 50-fold, from 1-fold to 100-fold, from 1-fold to 500-fold, from 1-fold to 1000-fold, from 1-fold to 10,000-fold, from 1-fold to 100,000-fold, from 5-fold to 10-fold, from 5-fold to 25-fold, from 5-fold to 50-fold, from 5-fold to 100-fold, from 5-fold to 500-fold, from 5-fold to 1000-fold, from 5-fold to 10,000-fold, from 5-fold to 100,000-fold, from 10-fold to 25-fold, from 10-fold to 50-fold, from 10-fold to 100-fold, from 10-fold to 500-fold, from 10-fold to 1000-fold, from 10-fold to 10,000-fold, from 10-fold to 100,000-fold, from 100-fold to 500-fold, from 100-fold to 1000-fold, from 100-fold to 10,000-fold, from 100-fold to 100,000-fold, from 1000-fold to 10,000-fold, from 1000-fold to 100,000-fold, or from 10,000-fold to 100,000-fold molar excess relative to the amount of the guide nucleic acid. In some embodiments, the guide nucleic acid is present in at least 1-fold, 2-fold, 3-fold, 4-fold, 5-fold, 10-fold, 25-fold, 50-fold, 100-fold, 500-fold, 1000-fold, 10,000-fold, or 100,000-fold molar excess relative to the amount of the target nucleic acid. In some embodiments, the guide nucleic acid is present in no more than 1-fold, 2-fold, 3-fold, 4-fold, 5-fold, 10-fold, 25-fold, 50-fold, 100-fold, 500-fold, 1000-fold, 10,000-fold, or 100,000-fold molar excess relative to the amount of the target nucleic acid. In some embodiments, the guide nucleic acid is present in from 1-fold to 2-fold, from 1-fold to 3-fold, from 1-fold to 4-fold, from 1-fold to 5-fold, from 1-fold to 10-fold, from 1-fold to 25-fold, from 1-fold to 50-fold, from 1-fold to 100-fold, from 1-fold to 500-fold, from 1-fold to 1000-fold, from 1-fold to 10,000-fold, from 1-fold to 100,000-fold, from 5-fold to 10-fold, from 5-fold to 25-fold, from 5-fold to 50-fold, from 5-fold to 100-fold, from 5-fold to 500-fold, from 5-fold to 1000-fold, from 5-fold to 10,000-fold, from 5-fold to 100,000-fold, from 10-fold to 25-fold, from 10-fold to 50-fold, from 10-fold to 100-fold, from 10-fold to 500-fold, from 10-fold to 1000-fold, from 10-fold to 10,000-fold, from 10-fold to 100,000-fold, from 100-fold to 500-fold, from 100-fold to 1000-fold, from 100-fold to 10,000-fold, from 100-fold to 100,000-fold, from 1000-fold to 10,000-fold, from 1000-fold to 100,000-fold, or from 10,000-fold to 100,000-fold molar excess relative to the amount of the target nucleic acid. In some embodiments, the target nucleic acid is not present in the sample.

### Kits

[0404] Disclosed herein are kits for use to detect, modify, edit, or regulate a target nucleic acid sequence as disclosed herein using the methods as discuss above. In some embodiments, the kit comprises the programmable nuclease system, reagents, and the support medium. The reagents and programmable nuclease system can be provided in a reagent chamber or on the support medium. Alternatively, the reagent and programmable nuclease system can be placed into the reagent chamber or the support medium by the individual using the kit. Optionally, the kit further comprises a buffer and a dropper. The reagent chamber can be a test well or container. The opening of the reagent chamber can be large enough to accommodate the support medium. The buffer can be provided in a dropper bottle for ease of dispensing. The dropper can be disposable and transfer a fixed volume. The dropper can be used to place a sample into the reagent chamber or on the support medium.

[0405] The kit or system for detection of a target nucleic acid described herein further comprises reagents for nucleic acid amplification of target nucleic acids in the sample. Isothermal nucleic acid amplification allows the use of the kit or system in remote regions or low resource settings without specialized equipment for amplification. Often, the reagents for nucleic acid amplification comprise a recombinase, an oligonucleotide primer, a single-stranded DNA binding (SSB) protein, and a polymerase. Sometimes, nucleic acid amplification of the sample improves at least one of sensitivity, specificity, or accuracy of the assay in detecting the target nucleic acid. In some cases, the nucleic acid amplification is performed in a nucleic acid amplification region on the support medium. Alternatively, or in combination, the nucleic acid amplification is performed in a reagent chamber, and the resulting sample is applied to the support medium. Sometimes, the nucleic acid amplification is isothermal nucleic acid amplification. In some cases, the nucleic acid amplification is transcription mediated amplification (TMA). Nucleic acid amplification is helicase dependent amplification (HDA) or circular helicase dependent amplification (cHDA) in other cases. In additional cases, nucleic acid amplification is strand displacement amplification (SDA). In some cases, nucleic acid amplification is by recombinase polymerase amplification (RPA). In some cases, nucleic acid amplification is by at least one of loop mediated amplification (LAMP) or the exponential amplification reaction (EXPAR). Nucleic acid amplification is, in some cases, by rolling circle amplification (RCA), ligase chain reaction (LCR), simple method amplifying RNA targets (SMART), single primer isothermal amplification (SPIA), multiple displacement amplification (MDA), nucleic acid sequence based amplification (NASBA), hinge-initiated primer-dependent amplification of nucleic acids (HIP), nicking enzyme amplification reaction (NEAR), or improved multiple displacement amplification (IMDA). Often, the nucleic acid amplification is performed for no greater than 1, 2, 3, 4, 5, 6, 7, 8, 9, 10, 11, 12, 13, 14, 15, 16, 17, 18, 19, 20, 25, 30, 40, 50, or 60 minutes, or any value from 1 to 60 minutes. Sometimes, the nucleic acid amplification is performed for from 1 to 60, from 5 to 55, from 10 to 50, from 15 to 45, from 20 to 40, or from 25 to 35 minutes. Sometimes, the nucleic acid amplification reaction is performed at a temperature of around 20-45° C. In some cases, the nucleic acid amplification reaction is performed at a temperature no greater than 20° C., 25° C., 30° C., 35° C., 37° C., 40° C., 45° C., or any value from 20° C. to 45° C. In some cases, the nucleic acid amplification reaction is performed at a temperature of at least 20° C., 25° C., 30° C., 35° C., 37° C., 40° C., or 45° C., or any value from 20° C. to 45° C. In some cases, the nucleic acid amplification reaction is performed at a temperature of from 20° C. to 45° C., from 25° C. to 40° C., from 30° C. to 40° C., or from 35° C. to 40° C.

[0406] In some embodiments, a kit for detecting a target nucleic acid comprising a support medium; a guide nucleic acid targeting a target sequence; a programmable nuclease capable of being activated when complexed with the guide nucleic acid and the target sequence; and a reporter nucleic acid comprising a detection moiety, wherein the reporter nucleic acid is capable of being cleaved by the activated nuclease, thereby generating a first detectable signal. Often, the kit further comprises primers for amplifying a target nucleic acid of interest to produce a PAM target nucleic acid.

[0407] In some embodiments, a kit for detecting a target nucleic acid comprising a PCR plate; a guide nucleic acid targeting a target sequence; a programmable nuclease capable of being activated when complexed with the guide nucleic acid and the target sequence; and a single stranded reporter nucleic acid comprising a detection moiety, wherein the reporter nucleic acid is capable of being cleaved by the activated nuclease, thereby generating a first detectable signal. The wells of the PCR plate can be pre-aliquoted with the guide nucleic acid targeting a target sequence, a programmable nuclease capable of being activated when complexed with the guide nucleic acid and the target sequence, and at least one population of a single stranded reporter nucleic acid comprising a detection moiety. A user can thus add the biological sample of interest to a well of the pre-aliquoted PCR plate and measure for the detectable signal with a fluorescent light reader or a visible light reader.

[0408] In some embodiments, a kit for modifying a target nucleic acid comprising a support medium; a guide nucleic acid targeting a target sequence; and a programmable nuclease capable of being activated when complexed with the guide nucleic acid and the target sequence.

[0409] In some embodiments, a kit for modifying a target nucleic acid comprising a PCR plate; a guide nucleic acid targeting a target sequence; and a programmable nuclease capable of being activated when complexed with the guide nucleic acid and the target sequence. The wells of the PCR plate can be pre-aliquoted with the guide nucleic acid targeting a target sequence, and a programmable nuclease capable of being activated when complexed with the guide nucleic acid and the target sequence. A user can thus add the biological sample of interest to a well of the pre-aliquoted PCR plate.

[0410] In some instances, such kits may include a package, carrier, or container that is compartmentalized to receive one or more containers such as vials, tubes, and the like, each of the container(s) comprising one of the separate elements to be used in a method described herein.

[0411] Suitable containers include, for example, test wells, bottles, vials, and test tubes. In one embodiment, the containers are formed from a variety of materials such as glass, plastic, or polymers.

[0412] The kit or systems described herein contain packaging materials. Examples of packaging materials include, but are not limited to, pouches, blister packs, bottles, tubes, bags, containers, bottles, and any packaging material suitable for intended mode of use.

[0413] A kit typically includes labels listing contents and/or instructions for use, and package inserts with instructions for use. A set of instructions will also typically be included. In one embodiment, a label is on or associated with the container. In some instances, a label is on a container when letters, numbers or other characters forming the label are attached, molded or etched into the container itself; a label is associated with a container when it is present within a receptacle or carrier that also holds the container, e.g., as a package insert. In one embodiment, a label is used to indicate that the contents are to be used for a specific therapeutic application. The label also indicates directions for use of the contents, such as in the methods described herein.

[0414] After packaging the formed product and wrapping or boxing to maintain a sterile barrier, the product may be terminally sterilized by heat sterilization, gas sterilization, gamma irradiation, or by electron beam sterilization. Alternatively, the product may be prepared and packaged by aseptic processing.

[0415] Unless otherwise defined, all technical terms used herein have the same meaning as commonly understood by one of ordinary skill in the art to which this invention belongs. As used in this specification and the appended claims, the singular forms “a,” “an,” and “the” include plural references unless the context clearly dictates otherwise. Any reference to “or” herein is intended to encompass “and/or” unless otherwise stated.

[0416] As used herein, the term “comprising” and its grammatical equivalents specifies the presence of stated features, integers, steps, operations, elements, and/or components, but do not preclude the presence or addition of one or more other features, integers, steps, operations, elements, components, and/or groups thereof. As used herein, the term “and/or” includes any and all combinations of one or more of the associated listed items.

[0417] Unless specifically stated or obvious from context, as used herein, the term “about” in reference to a number or range of numbers is understood to mean the stated number and numbers +/−10% thereof, or 10% below the lower listed limit and 10% above the higher listed limit for the values listed for a range.

[0418] As used herein the terms “individual,” “subject,” and “patient” are used interchangeably and include any member of the animal kingdom, including humans.

[0419] Methods of the disclosure can be performed in a subject. Compositions of the disclosure can be administered to a subject. A subject can be a human. A subject can be a mammal (e.g., rat, mouse, cow, dog, pig, sheep, horse). A subject can be a vertebrate or an invertebrate. A subject can be a laboratory animal. A subject can be a patient. A subject can be suffering from a disease. A subject can display symptoms of a disease. A subject may not display symptoms of a disease, but still have a disease. A subject can be under medical care of a caregiver (e.g., the subject is hospitalized and is treated by a physician). A subject can be a plant or a crop.

[0420] Methods of the disclosure can be performed in a cell. A cell can be in vitro. A cell can be in vivo. A cell can be ex vivo. A cell can be an isolated cell. A cell can be a cell inside of an organism. A cell can be an organism. A cell can be a cell in a cell culture. A cell can be one of a collection of cells. A cell can be a mammalian cell or derived from a mammalian cell. A cell can be a rodent cell or derived from a rodent cell. A cell can be a human cell or derived from a human cell. A cell can be a prokaryotic cell or derived from a prokaryotic cell. A cell can be a bacterial cell or can be derived from a bacterial cell. A cell can be an archaeal cell or derived from an archaeal cell. A cell can be a eukaryotic cell or derived from a eukaryotic cell. A cell can be a pluripotent stem cell. A cell can be a plant cell or derived from a plant cell. A cell can be an animal cell or derived from an animal cell. A cell can be an invertebrate cell or derived from an invertebrate cell. A cell can be a vertebrate cell or derived from a vertebrate cell. A cell can be a microbe cell or derived from a microbe cell. A cell can be a fungi cell or derived from a fungi cell. A cell can be from a specific organ or tissue.

[0421] Methods of the disclosure can be performed in a eukaryotic cell or cell line. In some embodiments, the eukaryotic cell is a Chinese hamster ovary (CHO) cell. In some embodiments, the eukaryotic cell is a Human embryonic kidney 293 cells (also referred to as HEK or HEK 293) cell. In some embodiments, the eukaryotic cell is a K562 cell.

[0422] Non-limiting examples of cell lines that can be used with the disclosure include C8161, CCRF-CEM, MOLT, mIMCD-3, NHDF, HeLa-S3, Huh1, Huh4, Huh7, HUVEC, HASMC, HEKn, HEKa, MiaPaCell, Panc1, PC-3, TF1, CTLL-2, CIR, Rat6, CVI, RPTE, A10, T24, J82, A375, ARH-77, Calu1, SW480, SW620, SKOV3, SK-UT, CaCo2, P388D1, SEM-K2, WEHI-231, HB56, TIB55, Jurkat, J45.01, LRMB, Bcl-1, BC-3, IC21, DLD2, Raw264.7, NRK, NRK-52E, MRC5, MEF, Hep G2, HeLa B, HeLa T4, COS, COS-1, COS-6, COS-M6A, BS-C-1 monkey kidney epithelial, BALB/3T3 mouse embryo fibroblast, 3T3 Swiss, 3T3-L1, 132-d5 human fetal fibroblasts; 10.1 mouse fibroblasts, 293-T, 3T3, 721, 9L, A2780, A2780ADR, A2780cis, A172, A20, A253, A431, A-549, ALC, B16, B35, BCP-1 cells, BEAS-2B, bEnd.3, BHK-21, BR 293, BxPC3, C3H-10T1/2, C6/36, Cal-27, CHO, CHO-7, CHO-IR, CHO-K1, CHO-K2, CHO-T, CHO Dhfr−/−, COR-L23, COR-L23/CPR, COR-L23/5010, COR-L23/R23, COS-7, COV-434, CML T1, CMT, CT26, D17, DH82, DU145, DuCaP, EL4, EM2, EM3, EMT6/AR1, EMT6/AR10.0, FM3, H1299, H69, HB54, HB55, HCA2, HEK-293, HeLa, Hepa1-6, Hepa1c1c7, HL-60, HMEC, HT-29, Jurkat, JY cells, K562 cells, Ku812, KCL22, KG1, KYO1, LNCap, Ma-Mel 1-48, MC-38, MCF-7, MCF-10A, MDA-MB-231, MDA-MB-468, MDA-MB-435, MDCK II, MDCK II, MOR/0.2R, MONO-MAC 6, MTD-1A, MyEnd, NCI-H69/CPR, NCI-H69/LX10, NCI-H69/LX20, NCI-H69/LX4, NIH-3T3, NALM-1, NW-145, OPCN/OPCT cell lines, Peer, PNT-1A/PNT 2, RenCa, RIN-5F, RMA/RMAS, Saos-2 cells, Sf-9, SkBr3, T2, T-47D, T84, THP1 cell line, U373, U87, U937, VCaP, Vero cells, WM39, WT-49, X63, YAC-1, and YAR. Non-limiting examples of other cells that can be used with the disclosure include immune cells, such as CART, T-cells, B-cells, NK cells, granulocytes, basophils, eosinophils, neutrophils, mast cells, monocytes, macrophages, dendritic cells, antigen-presenting cells (APC), or adaptive cells. Non-limiting examples of cells that can be used with this disclosure also include plant cells, such as Parenchyma, sclerenchyma, collenchyma, xylem, phloem, germline (e.g., pollen). Cells from lycophytes, ferns, gymnosperms, angiosperms, bryophytes, charophytes, chloropytes, rhodophytes, or glaucophytes. Non-limiting examples of cells that can be used with this disclosure also include stem cells, such as human stem cells, animal stem cells, stem cells that are not derived from human embryonic stem cells, embryonic stem cells, mesenchymal stem cells, pluripotent stem cells, induced pluripotent stem cells (iPS), somatic stem cells, adult stem cells, hematopoietic stem cells, tissue-specific stem cells.

[0423] Methods described herein may be used to create populations of cells comprising at least one of the cells described herein. In some cases, a population of cells comprises a non-naturally occurring compositions described herein.

[0424] Compositions of the disclosure include populations of cells, or any progeny thereof, comprising other compositions described herein or that have been modified by the methods described herein.

[0425] Methods described herein may include producing a protein from a cell or a population of cells described herein. In some cases, the method comprises producing a protein, and industrial protein, or a protein at large scale using a cell provided for herein that has been modified by any of the methods described herein. In some cases, a rodent cell or CHO cell is modified by a nuclease or cas enzyme described herein and is later used, expanded, or cultured for protein production. In some cases, a derivative or progeny of a modified CHO cell, as described herein, is used, expanded, or cultured for protein production. A method of protein production may further comprise a donor template, additional guide RNA, a buffer, a protease inhibitor, a nuclease inhibitor, or a detergent.

### EXAMPLES

[0426] The following examples are included to further describe some aspects of the present disclosure and should not be used to limit the scope of the invention.

### Example 1

### Human Codon Optimized CasΦ Polypeptide

[0427] Human codon-optimized nucleotide sequences of illustrative CasΦ polypeptides were prepared. TABLE 4 provides human codon optimized nucleotide sequences of illustrative CasΦ polypeptides that are suitable for use with the methods and compositions of the disclosure.

TABLE 4
Human codon optimized nucleotide sequences

| | Endogenous Amino | |
|---|---|---|
| Name | Acid Sequence | Human Codon Optimized Nucleotide Sequence |
| CasΦ.2 | MPKPAVESEFSKVLK | ATGCCTAAGCCTGCCGTGGAAAGCGAGTTCAG |
| | KHFPGERFRSSYMKR | CAAGGTGCTGAAGAAGCACTTCCCCGGCGAGC |
| | GGKILAAQGEEAVVA | GGTTCAGATCCAGCTACATGAAGAGAGGCGGC |
| | YLQGKSEEEPPNFQPP | AAGATCCTGGCCGCTCAAGGCGAAGAAGCCGT |
| | AKCHVVTKSRDFAE | GGTCGCATATCTGCAGGGCAAGAGCGAGGAA |
| | WPIMKASEAIQRYIYA | GAACCTCCTAACTTCCAGCCTCCTGCCAAGTG |
| | LSTTERAACKPGKSSE | CCACGTGGTCACCAAGAGCAGAGATTTCGCCG |
| | SHAAWFAATGVSNH | AGTGGCCCATCATGAAGGCCTCTGAAGCCATC |
| | GYSHVQGLNLIFDHT | CAGCGGTACATCTACGCCCTGAGCACAACAGA |
| | LGRYDGVLKKVQLR | AAGAGCCGCCTGCAAGCCTGGCAAGAGCAGC |
| | NEKARARLESINASR | GAATCTCACGCCGCTTGGTTTGCCGCTACCGG |
| | ADEGLPEIKAEEEEVA | CGTGTCCAATCACGGCTACTCTCATGTGCAGG |
| | TNETGHLLQPPGINPS | GCCTGAACCTGATCTTCGATCACACCCTGGGC |
| | FYVYQTISPQAYRPRD | AGATACGACGGCGTGCTGAAAAAGGTGCAGC |
| | EIVLPPEYAGYVRDPN | TGCGGAACGAGAAGGCCAGAGCCAGACTGGA |
| | APIPLGVVRNRCDIQK | ATCCATCAACGCCAGCAGAGCCGATGAGGGCC |
| | GCPGYIPEWQREAGT | TGCCTGAGATTAAGGCCGAAGAGGAAGAGGT |
| | AISPKTGKAVTVPGLS | GGCCACAAACGAAACCGGCCATCTGCTGCAGC |
| | PKKNKRMRRYWRSE | CACCTGGCATCAACCCTAGCTTCTACGTGTAC |
| | KEKAQDALLVTVRIG | CAGACAATCAGCCCTCAGGCCTACAGACCCAG |
| | TDWVVIDVRGLLRNA | GGACGAGATTGTGCTGCCTCCTGAGTATGCCG |
| | RWRTIAPKDISLNALL | GCTACGTGCGGGATCCCAACGCTCCTATTCCT |
| | DLFTGDPVIDVRRNIV | CTGGGCGTCGTGCGGAACAGATGCGACATCCA |
| | TFTYTLDACGTYARK | GAAAGGCTGCCCCGGCTACATTCCCGAGTGGC |
| | WTLKGKQTKATLDK | AGAGAGAAGCCGGCACCGCCATTTCTCCAAAG |
| | LTATQTVALVAIDLG | ACAGGCAAAGCCGTGACCGTGCCTGGCCTGTC |
| | QTNPISAGISRVTQEN | TCCTAAGAAAAACAAGCGGATGCGGCGGTACT |
| | GALQCEPLDRFTLPD | GGCGGAGCGAGAAAGAAAAAGCCCAGGACGC |
| | DLLKDISAYRIAWDR | CCTGCTGGTCACAGTGCGGATTGGCACAGATT |
| | NEEELRARSVEALPE | GGGTCGTGATCGATGTGCGCGGCCTGCTGAGA |
| | AQQAEVRALDGVSKE | AATGCCAGATGGCGGACAATCGCCCCTAAGGA |
| | TARTQLCADFGLDPK | CATCAGCCTGAACGCACTGCTGGACCTGTTCA |
| | RLPWDKMSSNTTFISE | CCGGCGATCCTGTGATTGACGTGCGGCGGAAC |
| | ALLSNSVSRDQVFFTP | ATCGTGACCTTCACCTACACACTGGACGCCTG |
| | APKKGAKKKAPVEV | CGGCACCTACGCCAGAAAGTGGACACTGAAG |
| | MRKDRTWARAYKPR | GGCAAGCAGACCAAGGCCACTCTGGACAAGC |
| | LSVEAQKLKNEALW | TGACCGCCACACAGACAGTGGCCCTGGTGGCT |
| | ALKRTSPEYLKLSRR | ATTGATCTGGGCCAGACAAACCCTATCAGCGC |
| | KEELCRRSINYVIEKT | CGGCATCAGCAGAGTGACCCAAGAAAATGGC |
| | RRRTQCQIVIPVIEDL | GCCCTGCAGTGCGAGCCCCTGGACAGATTCAC |
| | NVRFFHGSGKRLPGW | ACTGCCCGACGACCTGCTGAAGGACATCTCCG |
| | DNFFTAKKENRWFIQ | CCTATAGAATCGCCTGGGACCGCAATGAAGAG |
| | GLHKAFSDLRTHRSF | GAACTGAGAGCCAGAAGCGTGGAAGCCCTGC |
| | YVFEVRPERTSITCPK | CTGAAGCACAGCAGGCTGAAGTGCGAGCACT |
| | CGHCEVGNRDGEAFQ | GGACGGGGTGTCCAAAGAGACAGCCAGAACT |
| | CLSCGKTCNADLDVA | CAGCTGTGCGCCGACTTTGGACTGGACCCCAA |
| | THNLTQVALTGKTMP | AAGACTGCCCTGGGACAAGATGAGCAGCAAC |
| | KREEPRDAQGTAPAR | ACCACCTTCATCAGCGAGGCCCTGCTGAGCAA |
| | KTKKASKSKAPPAER | TAGCGTGTCCAGAGATCAGGTGTTCTTCACCC |
| | EDQTPAQEPSQTS | CTGCTCCAAAGAAGGGCGCCAAGAAGAAAGC |
| | (SEQ ID NO: 2) | CCCTGTCGAAGTGATGCGGAAGGACCGGACAT |
| | | GGGCCAGAGCTTACAAGCCCAGACTGTCCGTG |
| | | GAAGCTCAGAAGCTGAAGAACGAAGCCCTGT |
| | | GGGCCCTGAAGAGAACAAGCCCCGAGTACCT |
| | | GAAGCTGAGCCGGCGGAAAGAAGAACTCTGC |
| | | CGGCGGAGCATCAACTACGTGATCGAGAAAA |
| | | CCCGGCGGAGAACCCAGTGCCAGATCGTGATT |
| | | CCTGTGATCGAGGACCTGAACGTGCGGTTCTT |
| | | TCACGGCAGCGGCAAGAGACTGCCCGGCTGG |
| | | GATAATTTCTTCACCGCCAAAAAAGAAAACCG |
| | | GTGGTTCATCCAGGGCCTGCACAAGGCCTTCA |
| | | GCGACCTGAGAACCCACCGGTCCTTTTACGTG |
| | | TTCGAAGTGCGGCCCGAGCGGACCAGCATCAC |
| | | CTGTCCTAAATGCGGCCACTGCGAAGTGGGCA |
| | | ACAGAGATGGCGAGGCCTTCCAGTGTCTGAGC |
| | | TGTGGCAAGACCTGCAACGCCGACCTGGATGT |
| | | GGCCACTCACAATCTGACACAGGTGGCCCTGA |
| | | CCGGCAAGACCATGCCTAAGAGAGAGGAACC |
| | | TAGGGACGCCCAGGGTACAGCCCCTGCCAGAA |
| | | AGACAAAGAAAGCCAGCAAGAGCAAGGCCCC |
| | | TCCTGCCGAGAGAGAAGATCAGACCCCAGCTC |
| | | AAGAGCCCAGCCAGACATCT (SEQ ID NO: 1405) |
| CasΦ.4 | MEKEITELTKIRREFP | ATGGAAAAAGAGATCACCGAGCTGACCAAGA |
| | NKKFSSTDMKKAGKL | TCCGCAGAGAGTTCCCCAACAAGAAGTTCAGC |
| | LKAEGPDAVRDFLNS | AGCACCGACATGAAGAAGGCCGGCAAGCTGC |
| | CQEIIGDFKPPVKTNI | TGAAGGCCGAAGGACCTGATGCCGTGCGGGA |
| | VSISRPFEEWPVSMVG | CTTCCTGAACAGCTGCCAAGAGATCATCGGCG |
| | RAIQEYYFSLTKEELE | ACTTCAAGCCTCCAGTCAAGACCAACATCGTG |
| | SVHPGTSSEDHKSFFN | TCCATCAGCAGACCCTTCGAGGAATGGCCCGT |
| | ITGLSNYNYTSVQGL | GTCCATGGTTGGACGGGCCATCCAAGAGTACT |
| | NLIFKNAKAIYDGTLV | ACTTCAGCCTGACCAAAGAGGAACTGGAAAG |
| | KANNKNKKLEKKFN | CGTTCACCCCGGCACCAGCAGCGAGGACCACA |
| | EINHKRSLEGLPIITPD | AGAGCTTTTTCAACATCACCGGCCTGAGCAAC |
| | FEEPFDENGHLNNPPG | TACAACTACACCAGCGTGCAGGGCCTGAACCT |
| | INRNIYGYQGCAAKV | GATCTTCAAGAACGCCAAGGCCATCTACGACG |
| | FVPSKHKMVSLPKEY | GCACCCTGGTCAAGGCCAACAACAAGAACAA |
| | EGYNRDPNLSLAGFR | GAAGCTCGAGAAGAAGTTTAACGAGATCAAC |
| | NRLEIPEGEPGHVPWF | CACAAGCGGAGCCTGGAAGGCCTGCCTATCAT |
| | QRMDIPEGQIGHVNKI | CACCCCTGATTTCGAGGAACCCTTCGACGAGA |
| | QRFNFVHGKNSGKVK | ACGGCCACCTGAACAACCCTCCAGGCATCAAC |
| | FSDKTGRVKRYHHSK | CGGAACATCTACGGCTATCAGGGCTGCGCCGC |
| | YKDATKPYKFLEESK | CAAGGTGTTCGTGCCTTCTAAGCACAAGATGG |
| | KVSALDSILAIITIGDD | TGTCCCTGCCTAAAGAGTACGAGGGCTACAAC |
| | WVVFDIRGLYRNVFY | AGGGACCCCAACCTGTCTCTGGCCGGCTTCAG |
| | RELAQKGLTAVQLLD | AAACAGACTGGAAATCCCTGAGGGCGAGCCT |
| | LFTGDPVIDPKKGVV | GGCCATGTGCCATGGTTCCAGAGAATGGATAT |
| | TFSYKEGVVPVFSQKI | CCCCGAGGGCCAGATCGGACACGTGAACAAG |
| | VPRFKSRDTLEKLTSQ | ATCCAGCGGTTCAACTTCGTGCACGGCAAGAA |
| | GPVALLSVDLGQNEP | CAGCGGCAAAGTGAAGTTCTCCGACAAGACCG |
| | VAARVCSLKNINDKIT | GCAGAGTGAAGAGATACCACCACAGCAAGTA |
| | LDNSCRISFLDDYKK | CAAGGACGCTACCAAGCCTTACAAGTTCCTGG |
| | QIKDYRDSLDELEIKI | AAGAGTCCAAGAAGGTGTCAGCCCTGGACAG |
| | RLEAINSLETNQQVEI | CATCCTGGCCATCATCACAATCGGCGACGACT |
| | RDLDVFSADRAKANT | GGGTCGTGTTCGACATCAGAGGCCTGTACCGG |
| | VDMFDIDPNLISWDS | AACGTGTTCTACAGAGAGCTGGCCCAGAAAGG |
| | MSDARVSTQISDLYL | CCTGACAGCTGTGCAACTGCTGGACCTGTTTA |
| | KNGGDESRVYFEINN | CCGGCGATCCCGTGATCGACCCCAAGAAAGGC |
| | KRIKRSDYNISQLVRP | GTGGTCACCTTCAGCTACAAAGAGGGCGTCGT |
| | KLSDSTRKNLNDSIW | CCCCGTCTTTAGCCAGAAAATCGTGCCCCGGT |
| | KLKRTSEEYLKLSKR | TCAAGAGCCGGGACACCCTGGAAAAGCTGAC |
| | KLELSRAVVNYTIRQS | CTCTCAGGGACCTGTGGCTCTGCTGTCTGTGG |
| | KLLSGINDIVIILEDLD | ACCTGGGACAGAATGAACCTGTGGCCGCCAGA |
| | VKKKFNGRGIRDIGW | GTGTGCAGCCTGAAGAACATCAACGACAAGAT |
| | DNFFSSRKENRWFIPA | CACCCTGGACAACTCTTGCCGGATCAGCTTCC |
| | FHKAFSELSSNRGLCV | TGGACGACTACAAGAAGCAGATCAAGGACTA |
| | IEVNPAWTSATCPDC | CAGAGACAGCCTGGACGAGCTGGAAATCAAG |
| | GFCSKENRDGINFTCR | ATCCGGCTGGAAGCCATCAACTCCCTCGAGAC |
| | KCGVSYHADIDVATL | AAACCAGCAGGTCGAGATCAGAGATCTGGAC |
| | NIARVAVLGKPMSGP | GTGTTCAGCGCCGACCGGGCCAAAGCCAATAC |
| | ADRERLGDTKKPRVA | CGTGGACATGTTTGACATCGACCCTAACCTGA |
| | RSRKTMKRKDISNST | TCAGCTGGGACTCCATGAGCGACGCCAGAGTC |
| | VEAMVTA (SEQ ID | AGCACCCAGATCAGCGACCTGTACCTGAAGAA |
| | NO: 4) | TGGCGGCGACGAGAGCCGGGTGTACTTTGAGA |
| | | TTAACAACAAACGGATTAAGCGGAGCGACTAC |
| | | AACATCAGCCAGCTCGTGCGGCCCAAGCTGAG |
| | | CGATAGCACCAGAAAGAACCTGAACGACAGC |
| | | ATCTGGAAGCTGAAGCGGACCAGCGAGGAAT |
| | | ACCTGAAGCTGAGCAAGCGGAAGCTGGAACT |
| | | GAGCAGAGCCGTCGTGAATTACACCATCCGGC |
| | | AGAGCAAACTGCTGAGCGGCATCAATGACATC |
| | | GTGATCATTCTCGAGGACCTGGACGTGAAGAA |
| | | GAAATTCAACGGCAGAGGCATCCGCGATATCG |
| | | GCTGGGACAACTTCTTCAGCTCCCGGAAAGAA |
| | | AACCGGTGGTTCATCCCCGCCTTCCACAAGGC |
| | | CTTTAGCGAGCTGAGCAGCAACAGGGGCCTGT |
| | | GCGTGATCGAAGTGAATCCTGCCTGGACCAGC |
| | | GCCACCTGTCCTGATTGTGGCTTCTGCAGCAA |
| | | AGAAAACAGAGATGGCATCAACTTCACGTGCC |
| | | GGAAGTGCGGCGTGTCCTACCACGCCGATATT |
| | | GACGTGGCCACACTGAATATTGCCAGAGTGGC |
| | | CGTGCTGGGCAAGCCTATGTCTGGACCTGCCG |
| | | ACAGAGAGAGACTGGGCGACACCAAGAAACC |
| | | TAGAGTGGCCCGCAGCAGAAAGACCATGAAG |
| | | CGGAAGGACATCAGCAACAGCACCGTCGAGG |
| | | CCATGGTTACAGCT (SEQ ID NO: 1406) |
| CasΦ.11 | MSNTAVSTREHMSNK | ATGAGCAACACCGCCGTGTCCACCAGAGAACA |
| | TTPPSPLSLLLRAHFP | CATGTCCAACAAGACAACCCCTCCATCTCCTC |
| | GLKFESQDYKIAGKK | TGAGCCTGCTGCTGAGAGCCCACTTTCCTGGC |
| | LRDGGPEAVISYLTG | CTGAAGTTCGAGAGCCAGGACTACAAGATCGC |
| | KGQAKLKDVKPPAK | CGGCAAGAAACTGAGAGATGGCGGACCTGAG |
| | AFVIAQSRPFIEWDLV | GCCGTGATCAGCTACCTGACTGGAAAAGGCCA |
| | RVSRQIQEKIFGIPATK | GGCCAAGCTGAAGGACGTGAAGCCTCCTGCCA |
| | GRPKQDGLSETAFNE | AGGCCTTTGTGATCGCCCAGAGCAGACCCTTC |
| | AVASLEVDGKSKLNE | ATCGAGTGGGACCTCGTCAGAGTGTCCCGGCA |
| | ETRAAFYEVLGLDAP | GATCCAAGAGAAGATCTTTGGCATCCCCGCCA |
| | SLHAQAQNALIKSAIS | CCAAGGGCAGACCTAAGCAAGATGGCCTGAG |
| | IREGVLKKVENRNEK | CGAGACAGCCTTCAACGAAGCCGTGGCCAGCC |
| | NLSKTKRRKEAGEEA | TGGAAGTGGACGGCAAGAGCAAGCTGAACGA |
| | TFVEEKAHDERGYLI | GGAAACCAGAGCCGCCTTCTACGAGGTGCTGG |
| | HPPGVNQTIPGYQAV | GACTTGATGCCCCAAGCCTGCATGCTCAGGCC |
| | VIKSCPSDFIGLPSGCL | CAGAATGCCCTGATCAAGAGCGCCATCAGCAT |
| | AKESAEALTDYLPHD | CAGAGAAGGCGTGCTGAAGAAGGTGGAAAAC |
| | RMTIPKGQPGYVPEW | CGGAACGAGAAGAACCTGAGCAAGACCAAGC |
| | QHPLLNRRKNRRRRD | GGCGGAAAGAGGCTGGCGAAGAGGCCACCTT |
| | WYSASLNKPKATCSK | TGTGGAAGAGAAGGCCCACGACGAGCGGGGC |
| | RSGTPNRKNSRTDQIQ | TATCTGATTCATCCTCCTGGCGTGAACCAGAC |
| | SGRFKGAIPVLMRFQ | AATCCCCGGCTATCAGGCCGTGGTCATCAAGA |
| | DEWVIIDIRGLLRNAR | GCTGCCCCAGCGATTTCATCGGCCTGCCTAGT |
| | YRKLLKEKSTIPDLLS | GGCTGTCTGGCCAAAGAGTCTGCCGAGGCTCT |
| | LFTGDPSIDMRQGVC | GACCGATTACCTGCCTCACGACCGGATGACTA |
| | TFIYKAGQACSAKMV | TCCCCAAGGGACAGCCTGGCTATGTGCCCGAA |
| | KTKNAPEILSELTKSG | TGGCAGCACCCTCTGCTGAACAGAAGAAAGA |
| | PVVLVSIDLGQTNPIA | ACCGGCGCAGAAGAGACTGGTACAGCGCCAG |
| | AKVSRVTQLSDGQLS | CCTGAACAAGCCCAAGGCCACCTGTAGCAAGA |
| | HETLLRELLSNDSSDG | GATCCGGCACACCCAACCGGAAGAACAGCAG |
| | KEIARYRVASDRLRD | AACCGACCAGATCCAGAGCGGCAGATTCAAG |
| | KLANLAVERLSPEHK | GGCGCCATTCCTGTGCTGATGCGGTTCCAGGA |
| | SEILRAKNDTPALCKA | TGAGTGGGTCATCATCGACATCCGGGGCCTGC |
| | RVCAALGLNPEMIAW | TGAGAAACGCCCGGTATCGGAAGCTGCTGAAA |
| | DKMTPYTEFLATAYL | GAGAAGTCCACCATTCCTGACCTGCTGAGCCT |
| | EKGGDRKVATLKPKN | GTTCACCGGCGATCCCAGCATCGATATGAGAC |
| | RPEMLRRDIKFKGTE | AGGGCGTGTGCACCTTCATCTACAAGGCCGGC |
| | GVRIEVSPEAAEAYRE | CAGGCCTGTAGCGCCAAGATGGTCAAGACAA |
| | AQWDLQRTSPEYLRL | AGAACGCCCCTGAGATCCTGTCCGAGCTGACC |
| | STWKQELTKRILNQL | AAGTCTGGACCTGTGGTGCTGGTGTCCATCGA |
| | RHKAAKSSQCEVVV | CCTGGGCCAGACAAATCCTATCGCCGCCAAGG |
| | MAFEDLNIKMMHGN | TGTCCAGAGTGACCCAGCTGTCTGATGGCCAG |
| | GKWADGGWDAFFIK | CTGAGCCACGAGACACTGCTGAGGGAACTGCT |
| | KRENRWFMQAFHKS | GAGCAACGATAGCAGCGACGGCAAAGAGATC |
| | LTELGAHKGVPTIEVT | GCCCGGTACAGAGTGGCCAGCGACAGACTGA |
| | PHRTSITCTKCGHCDK | GAGACAAGCTGGCCAATCTGGCCGTGGAAAG |
| | ANRDGERFACQKCGF | ACTGAGCCCTGAGCACAAGAGCGAGATCCTGA |
| | VAHADLEIATDNIERV | GAGCCAAGAACGACACCCCTGCTCTGTGCAAG |
| | ALTGKPMPKPESERS | GCCAGAGTGTGTGCTGCCCTGGGACTGAACCC |
| | GDAKKSVGARKAAF | TGAAATGATCGCCTGGGACAAGATGACCCCTT |
| | KPEEDAEAAE (SEQ | ACACCGAGTTTCTGGCCACCGCCTACCTGGAA |
| | ID NO: 2468) | AAAGGCGGCGACAGAAAAGTGGCCACACTGA |
| | | AGCCCAAGAACAGACCCGAGATGCTGCGGCG |
| | | GGACATCAAGTTCAAGGGAACCGAGGGCGTC |
| | | AGAATCGAGGTGTCACCTGAAGCCGCCGAGGC |
| | | CTATAGAGAAGCCCAGTGGGATCTGCAGAGG |
| | | ACAAGCCCCGAGTACCTGAGACTGTCCACCTG |
| | | GAAGCAAGAGCTGACAAAGAGAATCCTGAAC |
| | | CAGCTGCGGCACAAGGCCGCCAAAAGCAGCC |
| | | AGTGTGAAGTGGTGGTCATGGCCTTCGAGGAC |
| | | CTGAACATCAAGATGATGCACGGCAACGGCA |
| | | AGTGGGCCGATGGTGGATGGGATGCCTTCTTC |
| | | ATCAAGAAACGCGAGAACCGGTGGTTCATGCA |
| | | GGCCTTCCACAAGAGCCTGACAGAGCTGGGAG |
| | | CACACAAGGGCGTGCCAACCATCGAAGTGACC |
| | | CCTCACAGAACCAGCATCACCTGTACCAAGTG |
| | | CGGCCACTGCGACAAGGCCAACAGAGATGGG |
| | | GAGAGATTCGCCTGCCAGAAATGCGGCTTTGT |
| | | GGCCCACGCCGATCTGGAAATCGCCACCGACA |
| | | ACATCGAGAGAGTGGCCCTGACAGGCAAGCC |
| | | CATGCCTAAGCCTGAGAGCGAGAGAAGCGGC |
| | | GACGCCAAGAAATCTGTGGGAGCCAGAAAGG |
| | | CCGCCTTCAAGCCTGAGGAAGATGCCGAAGCT |
| | | GCCGAG (SEQ ID NO: 1407) |
| CasΦ.12 | MIKPTVSQFLTPGFKL | ATGATCAAGCCTACCGTCAGCCAGTTTCTGAC |
| | IRNHSRTAGLKLKNE | CCCTGGCTTCAAGCTGATCCGGAACCACTCTA |
| | GEEACKKFVRENEIPK | GAACAGCCGGCCTGAAGCTGAAGAACGAGGG |
| | DECPNFQGGPAIANII | CGAAGAGGCCTGCAAGAAATTCGTGCGCGAG |
| | AKSREFTEWEIYQSSL | AACGAGATCCCCAAGGACGAGTGCCCCAACTT |
| | AIQEVIFTLPKDKLPEP | TCAAGGCGGACCCGCCATTGCCAACATCATTG |
| | ILKEEWRAQWLSEHG | CCAAGAGCCGCGAGTTCACCGAGTGGGAGATC |
| | LDTVPYKEAAGLNLII | TACCAGTCTAGCCTGGCCATCCAAGAAGTGAT |
| | KNAVNTYKGVQVKV | CTTCACCCTGCCTAAGGACAAGCTGCCCGAGC |
| | DNKNKNNLAKINRKN | CTATCCTGAAAGAGGAATGGCGAGCCCAGTGG |
| | EIAKLNGEQEISFEEIK | CTGTCTGAGCACGGACTGGATACCGTGCCTTA |
| | AFDDKGYLLQKPSPN | CAAAGAAGCCGCCGGACTGAACCTGATCATCA |
| | KSIYCYQSVSPKPFITS | AGAACGCCGTGAACACCTACAAGGGCGTGCA |
| | KYHNVNLPEEYIGYY | AGTGAAGGTGGACAACAAGAACAAAAACAAC |
| | RKSNEPIVSPYQFDRL | CTGGCCAAGATCAACCGGAAGAATGAGATCG |
| | RIPIGEPGYVPKWQYT | CCAAGCTGAACGGCGAGCAAGAGATCAGCTTC |
| | FLSKKENKRRKLSKRI | GAGGAAATCAAGGCCTTCGACGACAAGGGCT |
| | KNVSPILGIICIKKDW | ACCTGCTGCAGAAGCCCTCTCCAAACAAGAGC |
| | CVFDMRGLLRTNHW | ATCTACTGCTACCAGAGCGTGTCCCCTAAGCC |
| | KKYHKPTDSINDLFD | TTTCATCACCAGCAAGTACCACAACGTGAACC |
| | YFTGDPVIDTKANVV | TGCCTGAAGAGTACATCGGCTACTACCGGAAG |
| | RFRYKMENGIVNYKP | TCCAACGAGCCCATCGTGTCCCCATACCAGTT |
| | VREKKGKELLENICD | CGACAGACTGCGGATCCCTATCGGCGAGCCTG |
| | QNGSCKLATVDVGQ | GCTATGTGCCTAAGTGGCAGTACACCTTCCTG |
| | NNPVAIGLFELKKVN | AGCAAGAAAGAGAACAAGCGGCGGAAGCTGA |
| | GELTKTLISRHPTPIDF | GCAAGCGGATCAAGAATGTGTCCCCAATCCTG |
| | CNKITAYRERYDKLE | GGCATCATCTGCATCAAGAAAGATTGGTGCGT |
| | SSIKLDAIKQLTSEQKI | GTTCGACATGCGGGGCCTGCTGAGAACAAACC |
| | EVDNYNNNFTPQNTK | ACTGGAAGAAGTATCACAAGCCCACCGACAG |
| | QIVCSKLNINPNDLPW | CATCAACGACCTGTTCGACTACTTCACCGGCG |
| | DKMISGTHFISEKAQV | ATCCCGTGATCGACACCAAGGCCAATGTCGTG |
| | SNKSEIYFTSTDKGKT | CGGTTCCGGTACAAGATGGAAAACGGCATCGT |
| | KDVMKSDYKWFQDY | GAACTACAAGCCCGTGCGGGAAAAGAAGGGC |
| | KPKLSKEVRDALSDIE | AAAGAGCTGCTGGAAAACATCTGCGACCAGA |
| | WRLRRESLEFNKLSK | ACGGCAGCTGCAAGCTGGCCACAGTGGATGTG |
| | SREQDARQLANWISS | GGCCAGAACAACCCTGTGGCCATCGGCCTGTT |
| | MCDVIGIENLVKKNN | CGAGCTGAAAAAAGTGAACGGGGAGCTGACC |
| | FFGGSGKREPGWDNF | AAGACACTGATCAGCAGACACCCCACACCTAT |
| | YKPKKENRWWINAIH | CGATTTCTGCAACAAGATCACCGCCTACCGCG |
| | KALTELSQNKGKRVI | AGAGATACGACAAGCTGGAAAGCAGCATCAA |
| | LLPAMRTSITCPKCKY | GCTGGACGCCATCAAGCAGCTGACCAGCGAGC |
| | CDSKNRNGEKFNCLK | AGAAAATCGAAGTGGACAACTACAACAACAA |
| | CGIELNADIDVATENL | CTTCACGCCCCAGAACACCAAGCAGATCGTGT |
| | ATVAITAQSMPKPTC | GCAGCAAGCTGAATATCAACCCCAACGATCTG |
| | ERSGDAKKPVRARKA | CCCTGGGACAAGATGATCAGCGGCACCCACTT |
| | KAPEFHDKLAPSYTV | CATCAGCGAGAAGGCCCAGGTGTCCAACAAG |
| | VLREAV (SEQ ID NO: | AGCGAGATCTACTTTACCAGCACCGATAAGGG |
| | 12) | CAAGACCAAGGACGTGATGAAGTCCGACTAC |
| | | AAGTGGTTCCAGGACTATAAGCCCAAGCTGTC |
| | | CAAAGAAGTGCGGGACGCCCTGAGCGATATTG |
| | | AGTGGCGGCTGAGAAGAGAGAGCCTGGAATT |
| | | CAACAAGCTCAGCAAGAGCAGAGAGCAGGAC |
| | | GCCAGACAGCTGGCCAATTGGATCAGCAGCAT |
| | | GTGCGACGTGATCGGCATCGAGAACCTGGTCA |
| | | AGAAGAACAACTTCTTCGGCGGCAGCGGCAA |
| | | GAGAGAACCCGGCTGGGACAACTTCTACAAGC |
| | | CGAAGAAAGAAAACCGGTGGTGGATCAACGC |
| | | CATCCACAAGGCCCTGACAGAGCTGTCCCAGA |
| | | ACAAGGGAAAGAGAGTGATCCTGCTGCCTGCC |
| | | ATGCGGACCAGCATCACCTGTCCTAAGTGCAA |
| | | GTACTGCGACAGCAAGAACCGCAACGGCGAG |
| | | AAGTTCAATTGCCTGAAGTGTGGCATTGAGCT |
| | | GAACGCCGACATCGACGTGGCCACCGAAAATC |
| | | TGGCTACCGTGGCCATCACAGCCCAGAGCATG |
| | | CCTAAGCCAACCTGCGAGAGAAGCGGCGACG |
| | | CCAAGAAACCTGTGCGGGCCAGAAAAGCCAA |
| | | GGCTCCCGAGTTCCACGATAAGCTGGCCCCTA |
| | | GCTACACCGTGGTGCTGAGAGAAGCTGTG |
| | | (SEQ ID NO: 1408) |
| CasΦ.17 | MYSLEMADLKSEPSL | ATGTACAGCCTGGAAATGGCCGACCTGAAGTC |
| | LAKLLRDRFPGKYWL | CGAGCCTTCTCTGCTGGCTAAGCTGCTGAGAG |
| | PKYWKLAEKKRLTG | ACAGATTCCCCGGCAAGTACTGGCTGCCTAAG |
| | GEEAACEYMADKQL | TACTGGAAGCTGGCCGAGAAGAAGAGACTGA |
| | DSPPPNFRPPARCVIL | CAGGCGGAGAAGAAGCCGCCTGCGAGTACAT |
| | AKSRPFEDWPVHRVA | GGCTGACAAGCAGCTGGATAGCCCTCCACCTA |
| | SKAQSFVIGLSEQGFA | ACTTCCGGCCTCCAGCCAGATGTGTGATCCTG |
| | ALRAAPPSTADARRD | GCCAAGAGCAGACCCTTCGAGGATTGGCCAGT |
| | WLRSHGASEDDLMA | GCACAGAGTGGCCAGCAAGGCCCAGTCTTTTG |
| | LEAQLLETIMGNAISL | TGATCGGCCTGAGCGAGCAGGGCTTCGCTGCT |
| | HGGVLKKIDNANVK | CTTAGAGCTGCCCCTCCTAGCACAGCCGACGC |
| | AAKRLSGRNEARLNK | CAGAAGAGATTGGCTGAGAAGCCATGGCGCC |
| | GLQELPPEQEGSAYG | AGCGAGGATGATCTGATGGCTCTGGAAGCCCA |
| | ADGLLVNPPGLNLNI | GCTGCTGGAAACCATCATGGGCAACGCCATTT |
| | YCRKSCCPKPVKNTA | CTCTGCACGGCGGCGTGCTGAAGAAGATCGAC |
| | RFVGHYPGYLRDSDSI | AACGCCAACGTGAAGGCCGCCAAGAGACTGT |
| | LISGTMDRLTIIEGMP | CCGGAAGAAACGAGGCCAGACTGAACAAGGG |
| | GHIPAWQREQGLVKP | CCTGCAAGAGCTGCCTCCTGAGCAAGAGGGAT |
| | GGRRRRLSGSESNMR | CTGCCTATGGCGCCGATGGCCTGCTGGTTAAT |
| | QKVDPSTGPRRSTRS | CCTCCTGGCCTGAACCTGAACATCTACTGCAG |
| | GTVNRSNQRTGRNGD | AAAGAGCTGCTGCCCCAAGCCTGTGAAGAACA |
| | PLLVEIRMKEDWVLL | CCGCCAGATTCGTGGGACACTACCCCGGCTAC |
| | DARGLLRNLRWRESK | CTGAGAGACTCCGACAGCATCCTGATCAGCGG |
| | RGLSCDHEDLSLSGLL | CACCATGGACCGGCTGACAATCATCGAGGGAA |
| | ALFSGDPVIDPVRNEV | TGCCCGGACACATCCCCGCCTGGCAACGAGAA |
| | VFLYGEGIIPVRSTKP | CAGGGACTTGTGAAACCTGGCGGCAGAAGGC |
| | VGTRQSKKLLERQAS | GGAGACTGTCTGGCAGCGAGAGCAACATGAG |
| | MGPLTLISCDLGQTNL | ACAGAAGGTGGACCCCAGCACAGGCCCCAGA |
| | IAGRASAISLTHGSLG | AGAAGCACAAGATCCGGCACCGTGAACAGAA |
| | VRSSVRIELDPEIIKSF | GCAACCAGCGGACAGGCAGAAACGGCGATCC |
| | ERLRKDADRLETEILT | TCTGCTGGTGGAAATCCGGATGAAGGAAGATT |
| | AAKETLSDEQRGEVN | GGGTCCTGCTGGACGCCAGAGGCCTGCTGAGA |
| | SHEKDSPQTAKASLC | AATCTGAGATGGCGCGAGTCCAAGAGAGGCCT |
| | RELGLHPPSLPWGQM | GAGCTGCGATCACGAGGATCTGAGCCTGTCTG |
| | GPSTTFIADMLISHGR | GACTGCTGGCCCTGTTTTCTGGCGACCCCGTG |
| | DDDAFLSHGEFPTLE | ATCGATCCTGTGCGGAATGAGGTGGTGTTCCT |
| | KRKKFDKRFCLESRP | GTACGGCGAGGGCATCATTCCAGTGCGGAGCA |
| | LLSSETRKALNESLW | CAAAGCCTGTGGGCACCAGACAGAGCAAGAA |
| | EVKRTSSEYARLSQR | ACTGCTGGAACGGCAGGCCAGCATGGGCCCTC |
| | KKEMARRAVNFVVEI | TGACACTGATCTCTTGTGACCTGGGCCAGACC |
| | SRRKTGLSNVIVNIED | AACCTGATTGCCGGCAGAGCCTCTGCTATCAG |
| | LNVRIFHGGGKQAPG | CCTGACACATGGATCTCTGGGCGTCAGATCCA |
| | WDGFFRPKSENRWFI | GCGTGCGGATTGAGCTGGACCCCGAGATCATC |
| | QAIHKAFSDLAAHHG | AAGAGCTTCGAGCGGCTGAGAAAGGACGCCG |
| | IPVIESDPQRTSMTCPE | ACAGACTGGAAACCGAGATCCTGACCGCCGCC |
| | CGHCDSKNRNGVRFL | AAAGAAACCCTGAGCGACGAACAGAGGGGCG |
| | CKGCGASMDADFDA | AAGTGAACAGCCACGAGAAGGATAGCCCACA |
| | ACRNLERVALTGKPM | GACAGCCAAGGCCAGCCTGTGTAGAGAGCTG |
| | PKPSTSCERLLSATTG | GGACTGCACCCTCCATCTCTGCCTTGGGGACA |
| | KVCSDHSLSHDAIEK | GATGGGCCCTAGCACCACCTTTATCGCCGACA |
| | AS (SEQ ID NO: 17) | TGCTGATCTCCCACGGCAGGGACGATGATGCC |
| | | TTTCTGAGCCACGGCGAGTTCCCCACACTGGA |
| | | AAAGCGGAAGAAGTTCGATAAGCGGTTCTGCC |
| | | TGGAAAGCAGACCCCTGCTGAGCAGCGAGAC |
| | | AAGAAAGGCCCTGAACGAGTCCCTGTGGGAA |
| | | GTGAAGAGAACCAGCAGCGAGTACGCCCGGC |
| | | TGAGCCAGAGAAAGAAAGAGATGGCTAGACG |
| | | GGCCGTGAACTTCGTGGTCGAGATCTCCAGAA |
| | | GAAAGACCGGCCTGTCCAACGTGATCGTGAAC |
| | | ATCGAGGACCTGAACGTGCGGATCTTTCACGG |
| | | CGGAGGAAAACAGGCTCCTGGCTGGGATGGCT |
| | | TCTTCAGACCCAAGTCCGAGAACCGGTGGTTC |
| | | ATCCAGGCCATCCACAAGGCCTTCAGCGATCT |
| | | GGCCGCTCACCACGGAATCCCTGTGATCGAGA |
| | | GCGACCCTCAGCGGACCAGCATGACCTGTCCT |
| | | GAGTGTGGCCACTGCGACAGCAAGAACCGGA |
| | | ATGGCGTTCGGTTCCTGTGCAAAGGCTGTGGC |
| | | GCCTCCATGGACGCCGATTTTGATGCCGCCTG |
| | | CCGGAACCTGGAAAGAGTGGCTCTGACAGGC |
| | | AAGCCCATGCCTAAGCCTAGCACCTCCTGTGA |
| | | AAGACTGCTGAGCGCCACCACCGGCAAAGTGT |
| | | GCTCTGATCACTCCCTGTCTCACGACGCCATCG |
| | | AGAAGGCTTCTTAA (SEQ ID NO: 1409) |
| CasΦ.18 | MEKEITELTKIRREFP | ATGGAAAAAGAGATCACCGAGCTGACCAAGA |
| | NKKFSSTDMKKAGKL | TCCGCAGAGAGTTCCCCAACAAGAAGTTCAGC |
| | LKAEGPDAVRDFLNS | AGCACCGACATGAAGAAGGCCGGCAAGCTGC |
| | CQEIIGDFKPPVKTNI | TGAAGGCCGAAGGACCTGATGCCGTGCGGGA |
| | VSISRPFEEWPVSMVG | CTTCCTGAACAGCTGCCAAGAGATCATCGGCG |
| | RAIQEYYFSLTKEELE | ACTTCAAGCCTCCAGTCAAGACCAACATCGTG |
| | SVHPGTSSEDHKSFFN | TCCATCAGCAGACCCTTCGAGGAATGGCCCGT |
| | ITGLSNYNYTSVQGL | GTCCATGGTTGGACGGGCCATCCAAGAGTACT |
| | NLIFKNAKAIYDGTLV | ACTTCAGCCTGACCAAAGAGGAACTGGAAAG |
| | KANNKNKKLEKKFN | CGTTCACCCCGGCACCAGCAGCGAGGACCACA |
| | EINHKRSLEGLPIITPD | AGAGCTTTTTCAACATCACCGGCCTGAGCAAC |
| | FEEPFDENGHLNNPPG | TACAACTACACCAGCGTGCAGGGCCTGAACCT |
| | INRNIYGYQGCAAKV | GATCTTCAAGAACGCCAAGGCCATCTACGACG |
| | FVPSKHKMVSLPKEY | GCACCCTGGTCAAGGCCAACAACAAGAACAA |
| | EGYNRDPNLSLAGFR | GAAGCTCGAGAAGAAGTTTAACGAGATCAAC |
| | NRLEIPEGEPGHVPWF | CACAAGCGGAGCCTGGAAGGCCTGCCTATCAT |
| | QRMDIPEGQIGHVNKI | CACCCCTGATTTCGAGGAACCCTTCGACGAGA |
| | QRFNFVHGKNSGKVK | ACGGCCACCTGAACAACCCTCCAGGCATCAAC |
| | FSDKTGRVKRYHHSK | CGGAACATCTACGGCTATCAGGGCTGCGCCGC |
| | YKDATKPYKFLEESK | CAAGGTGTTCGTGCCTTCTAAGCACAAGATGG |
| | KVSALDSILAIITIGDD | TGTCCCTGCCTAAAGAGTACGAGGGCTACAAC |
| | WVVFDIRGLYRNVFY | AGGGACCCCAACCTGTCTCTGGCCGGCTTCAG |
| | RELAQKGLTAVQLLD | AAACAGACTGGAAATCCCTGAGGGCGAGCCT |
| | LFTGDPVIDPKKGVV | GGCCATGTGCCATGGTTCCAGAGAATGGATAT |
| | TFSYKEGVVPVFSQKI | CCCCGAGGGCCAGATCGGACACGTGAACAAG |
| | VPRFKSRDTLEKLTSQ | ATCCAGCGGTTCAACTTCGTGCACGGCAAGAA |
| | GPVALLSVDLGQNEP | CAGCGGCAAAGTGAAGTTCTCCGACAAGACCG |
| | VAARVCSLKNINDKIT | GCAGAGTGAAGAGATACCACCACAGCAAGTA |
| | LDNSCRISFLDDYKK | CAAGGACGCTACCAAGCCTTACAAGTTCCTGG |
| | QIKDYRDSLDELEIKI | AAGAGTCCAAGAAGGTGTCAGCCCTGGACAG |
| | RLEAINSLETNQQVEI | CATCCTGGCCATCATCACAATCGGCGACGACT |
| | RDLDVFSADRAKANT | GGGTCGTGTTCGACATCAGAGGCCTGTACCGG |
| | VDMFDIDPNLISWDS | AACGTGTTCTACAGAGAGCTGGCCCAGAAAGG |
| | MSDARVSTQISDLYL | CCTGACAGCTGTGCAACTGCTGGACCTGTTTA |
| | KNGGDESRVYFEINN | CCGGCGATCCCGTGATCGACCCCAAGAAAGGC |
| | KRIKRSDYNISQLVRP | GTGGTCACCTTCAGCTACAAAGAGGGCGTCGT |
| | KLSDSTRKNLNDSIW | CCCCGTCTTTAGCCAGAAAATCGTGCCCCGGT |
| | KLKRTSEEYLKLSKR | TCAAGAGCCGGGACACCCTGGAAAAGCTGAC |
| | KLELSRAVVNYTIRQS | CTCTCAGGGACCTGTGGCTCTGCTGTCTGTGG |
| | KLLSGINDIVIILEDLD | ACCTGGGACAGAATGAACCTGTGGCCGCCAGA |
| | VKKKFNGRGIRDIGW | GTGTGCAGCCTGAAGAACATCAACGACAAGAT |
| | DNFFSSRKENRWFIPA | CACCCTGGACAACTCTTGCCGGATCAGCTTCC |
| | FHKTFSELSSNRGLCV | TGGACGACTACAAGAAGCAGATCAAGGACTA |
| | IEVNPAWTSATCPDC | CAGAGACAGCCTGGACGAGCTGGAAATCAAG |
| | GFCSKENRDGINFTCR | ATCCGGCTGGAAGCCATCAACTCCCTCGAGAC |
| | KCGVSYHADIDVATL | AAACCAGCAGGTCGAGATCAGAGATCTGGAC |
| | NIARVAVLGKPMSGP | GTGTTCAGCGCCGACCGGGCCAAAGCCAATAC |
| | ADRERLGDTKKPRVA | CGTGGACATGTTTGACATCGACCCTAACCTGA |
| | RSRKTMKRKDISNST | TCAGCTGGGACTCCATGAGCGACGCCAGAGTC |
| | VEAMVTA (SEQ ID | AGCACCCAGATCAGCGACCTGTACCTGAAGAA |
| | NO: 18) | TGGCGGCGACGAGAGCCGGGTGTACTTTGAGA |
| | | TTAACAACAAACGGATTAAGCGGAGCGACTAC |
| | | AACATCAGCCAGCTCGTGCGGCCCAAGCTGAG |
| | | CGATAGCACCAGAAAGAACCTGAACGACAGC |
| | | ATCTGGAAGCTGAAGCGGACCAGCGAGGAAT |
| | | ACCTGAAGCTGAGCAAGCGGAAGCTGGAACT |
| | | GAGCAGAGCCGTCGTGAATTACACCATCCGGC |
| | | AGAGCAAACTGCTGAGCGGCATCAATGACATC |
| | | GTGATCATTCTCGAGGACCTGGACGTGAAGAA |
| | | GAAATTCAACGGCAGAGGCATCCGCGATATCG |
| | | GCTGGGACAACTTCTTCAGCTCCCGGAAAGAA |
| | | AACCGGTGGTTCATCCCCGCCTTCCACAAGAC |
| | | CTTTAGCGAGCTGAGCAGCAACAGGGGCCTGT |
| | | GCGTGATCGAAGTGAATCCTGCCTGGACCAGC |
| | | GCCACCTGTCCTGATTGTGGCTTCTGCAGCAA |
| | | AGAAAACAGAGATGGCATCAACTTCACGTGCC |
| | | GGAAGTGCGGCGTGTCCTACCACGCCGATATT |
| | | GACGTGGCCACACTGAATATTGCCAGAGTGGC |
| | | CGTGCTGGGCAAGCCTATGTCTGGACCTGCCG |
| | | ACAGAGAGAGACTGGGCGACACCAAGAAACC |
| | | TAGAGTGGCCCGCAGCAGAAAGACCATGAAG |
| | | CGGAAGGACATCAGCAACAGCACCGTCGAGG |
| | | CCATGGTTACAGCTTAA (SEQ ID NO: 1410) |

### Example 2

### Illustrative CasΦ Guide RNA Sequences

[0428] Guide RNA sequences for complexing with the CasΦ polypeptides of the disclosure were prepared. TABLE 5 provides illustrative guide RNA sequences to target the target nucleic acid sequence TATTAAATACTCGTATTGCTGTTCGATTAT (SEQ ID NO: 1411). A guide nucleic acid of the disclosure can comprise the sequence of any of the guide RNAs provided in Table 5 or a portion thereof.

TABLE 5
Illustrative CasΦ guide RNA sequences

| | | | | RNA sequence |
|---|---|---|---|---|
| | | | | (5′ -> 3′), |
| | RNA | Repeat | Spacer | shown as DNA |
| Name | Type | length | length | BOLD = spacer |
| CasΦ.2 | crRNA | 36 | 30 | GTCGGAACGCTCAACGATTGC |
| | | | CCCTC | ACGAGGGGAC |
| | | | | (SEQ ID NO: 49) |
| CasΦ.7 | crRNA | 36 | 30 | GGATCCAATCCTTTTTGATTG |
| | | | | CCCAATTCGTTGGGAC |
| | | | | (SEQ ID NO: 51) |
| CasΦ.10 | crRNA | 36 | 30 | GGATCTGAGGATCATTATTGC |
| | | | | TCGTTACGACGAGAC |
| | | | | (SEQ ID NO: 52) |
| CasΦ.18 | crRNA | 36 | 30 | ACCAAAACGACTATTGATTGC |
| | | | | CCAGTACGCTGGGAC |
| | | | | (SEQ ID NO: 57) |

### Example 3

### CasΦ Acts as a Programmable Nickase

[0429] The present example shows that a CasΦ polypeptide can comprise programmable nickase activity. FIG. 1 shows data from an experiment to analyze nicking ability of CasΦ ortholog proteins. For this experiment, five different CasΦ polypeptides: designated CasΦ.2, CasΦ.11, CasΦ.17, CasΦ.18, and CasΦ.12 in FIG. 1, were analyzed. Amino acid sequences of the proteins used in the experiment are shown in TABLE 4.

[0430] All reactions were carried out using guide RNA comprising a crRNA sequence comprising the CasΦ.18 repeat sequence (ACCAAAACGACTATTGATTGCCCAGTACGCTGGGAC (SEQ ID NO: 57)). Complexing of the CasΦ polypeptide with a guide RNA to form the ribonucleoprotein (RNP) complex was carried out at room temperature for 20 minutes. The RNP complex was incubated with the target DNA at 37° C. for 60 minutes in NEB CutSmart buffer (50 mM Potassium Acetate, 20 mM Tris-Acetate, 10 mM Magnesium Acetate, 100 ug/ml BSA, pH 7.9 at 25° C.). The target nucleic acid used for the reactions was a super-coiled plasmid DNA comprising the target sequence TATTAAATACTCGTATTGCTGTTCGATTAT (SEQ ID NO: 116), which was immediately downstream of a TTTN PAM sequence. The plasmid DNA sequence is provided below with the target sequence in bold:

(SEQ ID NO: 1412)
gtgtagataactacgatacgggagggcttaccatctggccccagtgctgcaatgataccgcgagac
ccacgctcaccggctccagatttatcagcaataaaccagccagccggaagggccgagcgcagaagt
ggtcctgcaactttatccgcctccatccagtctattaattgttgccgggaagctagagtaagtagt
tcgccagttaatagtttgcgcaacgttgttgccattgctacaggcatcgtggtgtcacgctcgtcg
tttggtatggcttcattcagctccggttcccaacgatcaaggcgagttacatgatcccccatgttg
tgcaaaaaagcggttagctccttcggtcctccgatcgttgtcagaagtaagttggccgcagtgtta
tcactcatggttatggcagcactgcataattctcttactgtcatgccatccgtaagatgcttttct
gtgactggtgagtactcaaccaagtcattctgagaatagtgtatgcggcgaccgagttgctcttgc
ccggcgtcaatacgggataataccgcgccacatagcagaactttaaaagtgctcatcattggaaaa
cgttcttcggggcgaaaactctcaaggatcttaccgctgttgagatccagttcgatgtaacccact
cgtgcacccaactgatcttcagcatcttttactttcaccagcgtttctgggtgagcaaaaacagga
aggcaaaatgccgcaaaaaagggaataagggcgacacggaaatgttgaatactcatactcttcctt
tttcaatattattgaagcatttatcagggttattgtctcatgagcggatacatatttgaatgtatt
tagaaaaataaacaaataggggttccgcgcacatttccccgaaaagtgccacctgacgtctaagaa
accattattatcatgacattaacctataaaaataggcgtatcacgaggccctttcgtctcgcgcgt
ttcggtgatgacggtgaaaacctctgacacatgcagctcccggagacggtcacagcttgtctgcca
tggacatgtttaTATTAAATACTCGTATTGCTGTTCGATTATgaccgaattccctgtcgtgccagc
tgcattaatgaatcggccaacgcgcggggagaggcggtttgcgtattgggcgctcttccgcttcct
cgctcactgactcgctgcgctcggtcgttcggctgcggcgagcggtatcagctcactcaaaggcgg
taatacggttatccacagaatcaggggataacgcaggaaagaacatgtgagcaaaaggccagcaaa
aggccaggaaccgtaaaaaggccgcgttgctggcgtttttccataggctccgcccccctgacgagc
atcacaaaaatcgacgctcaagtcagaggtggcgaaacccgacaggactataaagataccaggcgt
ttccccctggaagctccctcgtgcgctctcctgttccgaccctgccgcttaccggatacctgtccg
cctttctcccttcgggaagcgtggcgctttctcatagctcacgctgtaggtatctcagttcggtgt
aggtcgttcgctccaagctgggctgtgtgcacgaaccccccgttcagcccgaccgctgcgccttat
ccggtaactatcgtcttgagtccaacccggtaagacacgacttatcgccactggcagcagccactg
gtaacaggattagcagagcgaggtatgtaggcggtgctacagagttcttgaagtggtggcctaact
acggctacactagaagaacagtatttggtatctgcgctctgctgaagccagttaccttcggaaaaa
gagttggtagctcttgatccggcaaacaaaccaccgctggtagcggtggtttttttgtttgcaagc
agcagattacgcgcagaaaaaaaggatctcaagaagatcctttgatcttttctacggggtctgacg
ctcagtggaacgaaaactcacgttaagggattttggtcatgagattatcaaaaaggatcttcacct
agatccttttaaattaaaaatgaagttttaaatcaatctaaagtatatatgagtaaacttggtctg
acagttaccaatgcttaatcagtgaggcacctatctcagcgatctgtctatttcgttcatccatag
ttgcctgactccccgtc

[0431] As shown in FIG. 1, CasΦ.17 and CasΦ.18 produced only nicked product (i.e. single strand breaks; “nicked”) by 60 minutes. By way of comparison, CasΦ.12 generated almost entirely linearized product demonstrating double-stranded breaks, while CasΦ.2 and CasΦ.11 generated some linearized product (i.e. double strand breaks) but primarily produced nicked intermediate. This data demonstrates that CasΦ orthologs can comprise programmable nickase activity.

### Example 4

Effect of crRNA Repeat Sequence and RNP Complexing Temperature on CasΦ Nickase Activity

[0432] The present example shows that the crRNA repeat sequence and RNP complexing temperature can affect nickase activity of CasΦ. FIG. 2A and FIG. 2B illustrate results of a cis-cleavage experiment showing the percentage of input plasmid DNA that was nicked after 60 minutes of reaction at 37° C. by CasΦ RNP complex assembled at room temperature (FIG. 2A) or at 37° C. (FIG. 2B). FIG. 2C illustrates alignment of CasΦ.2, CasΦ.7, CasΦ.10, and CasΦ.18 repeat sequences showing conserved (highlighted in black) and diverged nucleotides.

[0433] For this study, each of three CasΦ polypeptides (CasΦ.11, CasΦ.17 and CasΦ.18 in FIGS. 2A and 2B) was tested for their ability to nick input plasmid DNA when complexed with one of four crRNAs comprising the repeat sequences of CasΦ.2, CasΦ.7, CasΦ.10 and CasΦ.18 (abbreviated j2, j7, j10 and j18, respectively in FIG. 2A and FIG. 2B). Amino acid sequences of the proteins used in the experiment are shown in TABLE 4. Guide RNA sequences corresponding to j2, j7, j10 and j18 are provided in TABLE 5. The input plasmid was a super-coiled plasmid (sequence shown in EXAMPLE 3) comprising the target sequence TATTAAATACTCGTATTGCTGTTCGATTAT (SEQ ID NO: 108) immediately downstream of a TTTN PAM. The incubation reaction to form the RNP complex was performed either at room temperature or at 37° C. for 60 minutes in NEB CutSmart buffer (50 mM Potassium Acetate, 20 mM Tris-Acetate, 10 mM Magnesium Acetate, 100 ug/ml BSA, pH 7.9 at 25° C.). The RNP complex was incubated with the input plasmid for 60 minutes at 37° C. The reaction was quenched with 1 mg/ml proteinase K, 0.08% SDS, and 15 mM EDTA. The data illustrated in FIG. 2A and FIG. 2B comes from a single replicate of the in vitro cis-cleavage experiment.

[0434] As shown in FIG. 2A, when the CasΦ polypeptides were assembled into RNP complexes with the guide nucleic acids at room temperature, crRNAs comprising repeat sequences from any of the proteins supported nickase activity by CasΦ.11, CasΦ.17 and CasΦ.18, with the exception of the CasΦ.17/CasΦ.2-repeat pairing. As shown in FIG. 2B, when the CasΦ polypeptides were assembled into RNP complexes with the guide nucleic acids at 37° C., as opposed to at room temperature, the activity of each protein was completely abolished when complexed with crRNAs comprising a repeat sequence from CasΦ.2 or CasΦ.10.

[0435] This example showed that the nickase activity of CasΦ can be affected by the crRNA repeat sequence. The data also showed that the nickase activity of CasΦ can be affected by the RNP complexing temperature.

[0436] FIG. 2D provides further examples of the nickase activity of CasΦ affected by the RNP complexing temperature. Nickase activity was assessed as described above for CasΦ.2, CasΦ.4, CasΦ.6, CasΦ.9, CasΦ.10, CasΦ.12 and CasΦ.13. Amino acid sequences of the proteins used in the experiment are shown in TABLE 1.

[0437] The effect of complexing temperature on the double strand cutting activity of CasΦ polypeptides was also assessed as described above. As shown in FIG. 2D, generally the double strand cutting activity of CasΦ polypeptides, particularly CasΦ.2, CasΦ.4 and CasΦ.12, is not affected by the RNP complexing temperature. Although some systems with less efficient double strand cutting activity, such as CasΦ.10, CasΦ.11 and CasΦ.13 in this example, are sensitive to RNP complexing temperature.

### Example 5

### CasΦ Nickase Cleaves Non-Target Strand

[0438] The present example shows that CasΦ nickase cleaves the non-target DNA strand. Results of the study are shown in FIG. 3. For this study, four different CasΦ polypeptides (CasΦ.12, CasΦ.2, CasΦ.11, and CasΦ.18 as shown in FIG. 1) were analyzed using a cis-cleavage assay. Amino acid sequences of the proteins used in the experiment are shown in TABLE 4. The CasΦ polypeptides were complexed with guide RNA to form RNP complexes All reactions were carried out using guide RNA comprising a crRNA sequence comprising the CasΦ.18 repeat sequence (ACCAAAACGACTATTGATTGCCCAGTACGCTGGGAC (SEQ ID NO: 57)). Complexing of the CasΦ polypeptides with guide RNA to form the ribonucleoprotein (RNP) complex was carried out at room temperature for 20 minutes. The RNP complex was incubated with the target DNA at 37° C. for 60 minutes in NEB CutSmart buffer (50 mM Potassium Acetate, 20 mM Tris-Acetate, 10 mM Magnesium Acetate, 100 ug/ml BSA, pH 7.9 at 25° C. The target nucleic acid used for the reactions was a super-coiled plasmid DNA (sequence shown in EXAMPLE 3) comprising the target sequence TATTAAATACTCGTATTGCTGTTCGATTAT (SEQ ID NO: 116), which was immediately downstream of a TTTN PAM sequence. The reaction was quenched with 1 mg/ml proteinase K, 0.08% SDS, and 15 mM EDTA. The resulting cleaved DNA from the reaction was Sanger sequenced using forward and reverse primers. The forward primer provided the sequence of the target strand (TS), while the reverse primer provided the sequence of the non-target strand (NTS). If a strand had been cleaved by the CasΦ polypeptide, the sequencing signal would drop off from the cleavage site in the sequencing data. FIG. 3 illustrates results of the Sanger sequencing.

[0439] FIG. 3, panel A, shows a control reaction where no CasΦ polypeptide was added. As a result, the target DNA was uncut and resulted in complete sequencing of both target and non-target strands. FIG. 3, panel B, illustrates the cleavage pattern for CasΦ.12, which comprises double-stranded DNA cleavage activity. The sequencing signal dropped off on both the target and the non-target strands (as shown by arrows), demonstrating cleavage of both strands of the target DNA. FIG. 3, panel C, illustrates the cleavage pattern for CasΦ.2, which predominantly nicks DNA (as illustrated in FIG. 1). The data showed that the sequencing signal dropped off on only the non-target strand (bottom arrow) demonstrating cleavage of the non-target strand. FIG. 3, panel D, illustrates the cleavage pattern for CasΦ.11, which comprises strong nickase activity (as illustrated in FIG. 1). The data showed that the sequencing signal dropped off on only the non-target strand (bottom arrow) demonstrating cleavage of the non-target strand. FIG. 3, panel E, illustrates the cleavage pattern for CasΦ.18, which comprises strong nickase activity (as illustrated in FIG. 1). The data showed that the sequencing signal dropped off on only the non-target strand (bottom arrow) demonstrating cleavage of the non-target strand. Thus, this example shows that CasΦ polypeptides comprising nickase activity cleave the non-target strand of a target DNA.

### Example 6

### Editing a Target Nucleic Acid

[0440] This example describes genetic modification of a target nucleic acid with a programmable CasΦ nuclease (e.g., any one of SEQ ID NO: 1-SEQ ID NO: 47, SEQ ID NO: 105 or SEQ ID NO: 107) of the present disclosure. The programmable CasΦ nuclease is administered with a guide nucleic acid capable of hybridizing to a segment of a target nucleic acid sequence of interests in a ribonucleoprotein complex or as separate nucleic acids encoding for each component. Subjects administered said composition are humans or non-human mammals. Upon binding of the guide nucleic acid to the segment of the target nucleic acid, the programmable CasΦ nuclease nicks or induces a double stranded break in the target. The target undergoes NHEJ or HDR. A donor nucleic acid may be co-administered. The donor nucleic acid may be to replace or repair a mutated segment of the target nucleic acid. The subject may have a disease. Upon genetic modification of the target nucleic acid, the disease or a symptom of the disease may be alleviated, or the disease may be cured.

### Example 7

### Editing a Plant or Crop Target Nucleic Acid

[0441] This example describes genetic modification of a plant or crop target nucleic acid with a programmable CasΦ nuclease (e.g., any one of SEQ ID NO: 1-SEQ ID NO: 47, SEQ ID NO: 105 or SEQ ID NO: 107) of the present disclosure. The programmable CasΦ nuclease is administered with a guide nucleic acid capable of hybridizing to a segment of a target nucleic acid sequence of interests in a ribonucleoprotein complex or as separate nucleic acids encoding for each component. Subjects administered said composition are plant or crop cells. Upon binding of the guide nucleic acid to the segment of the target nucleic acid, the programmable CasΦ nuclease nicks or induces a double stranded break in the target. The target undergoes NHEJ or HDR. A donor nucleic acid may be co-administered. The donor nucleic acid may be to replace or repair a mutated segment of the target nucleic acid. The result is an engineered plant or crop cell.

### Example 8

### Genetic Modification of a Target Nucleic Acid

[0442] This example describes genetic modification of a target nucleic acid with a dead programmable CasΦ nuclease (e.g., any one of SEQ ID NO: 1-SEQ ID NO: 47, SEQ ID NO: 105 or SEQ ID NO: 107 with a mutation rendering it catalytically inactive) of the present disclosure. The programmable CasΦ nuclease is further linked to a transcriptional regulator. The programmable CasΦ nuclease, the transcriptional regulator, and the guide nucleic acid capable of hybridizing to a segment of a target nucleic acid sequence of interests are administered as a ribonucleoprotein complex or as separate nucleic acids encoding for each component. Subjects administered said composition are humans or non-human mammals. Upon binding of the guide nucleic acid to the segment of the target nucleic acid, the dead programmable CasΦ nuclease upregulates or downregulates transcription. The subject may have a disease. Upon genetic modification of the target nucleic acid, the disease or a symptom of the disease may be alleviated, or the disease may be cured.

### Example 9

### Genetic Modification of a Plant of Crop Target Nucleic Acid

[0443] This example describes genetic modification of a plant or crop target nucleic acid with a dead programmable CasΦ nuclease (e.g., any one of SEQ ID NO: 1-SEQ ID NO: 47, SEQ ID NO: 105 or SEQ ID NO: 107 with a mutation rendering it catalytically inactive) of the present disclosure. The programmable CasΦ nuclease is further linked to a transcriptional regulator. The programmable CasΦ nuclease, the transcriptional regulator, and the guide nucleic acid capable of hybridizing to a segment of a target nucleic acid sequence of interests are administered as a ribonucleoprotein complex or as separate nucleic acids encoding for each component. Subjects administered said composition are humans or non-human mammals. Upon binding of the guide nucleic acid to the segment of the target nucleic acid, the dead programmable CasΦ nuclease upregulates or downregulates transcription. The result is an engineered plant or crop cell.

### Example 10

### Detection of a Target Nucleic Acid

[0444] This example describes detection of a target nucleic acid with a programmable CasΦ nuclease (e.g., any one of SEQ ID NO: 1-SEQ ID NO: 47, SEQ ID NO: 105 or SEQ ID NO: 107) of the present disclosure. The programmable CasΦ nuclease, the guide nucleic acid capable of hybridizing to a segment of a target nucleic acid sequence of interests, and a labeled ssDNA reporter are contacted to a sample. In the presence of the target nucleic acid in the sample, the guide nucleic acid binds to its target, thereby activating the programmable CasΦ nuclease to cleave the labeled ssDNA reporter and releasing a detectable label. The detectable label emits a detectable signal that is, optionally, quantified. In the absence of the target nucleic acid in the sample, the guide nucleic acid does not bind to its target, the labeled ssDNA reporter is not cleaved, and low or no signal is detected.

### Example 11

Preference for Nicking or Double Strand Cleavage of Target DNA is a Property of CasΦ Enzymes, Independent of crRNA Repeat or Target Sequences

[0445] This example describes how the preference of a CasΦ polypeptide to cleave a single or both strands of a double-strand target DNA is independent of the crRNA repeat or target sequence. For this study, each of twelve CasΦ polypeptide (CasΦ.1, CasΦ.2, CasΦ.3, CasΦ.4, CasΦ.6, CasΦ.9, CasΦ.10, CasΦ.11, CasΦ.12, CasΦ.13, CasΦ.17 and CasΦ.18) was complexed with one of the crRNAs comprising the repeat sequences of CasΦ.1, CasΦ.2, CasΦ.4, CasΦ.7, CasΦ.10, CasΦ.11, CasΦ.12, CasΦ.13, CasΦ.17 and CasΦ.18. Amino acid sequences of the proteins used in the experiment are shown in TABLE 1 and crRNA sequences are provided in TABLE 2. The input plasmid was one of two super-coiled plasmids containing a target sequence (TATTAAATACTCGTATTGCTGTTCGATTAT (SEQ ID NO: 108) or CACAGCTTGTCTGTAAGCGGATGCCATATG (SEQ ID NO: 109)) immediately downstream of a TTTN PAM. The incubation reaction to form the RNP complex was performed at room temperature for 20 minutes in NEB CutSmart buffer (50 mM Potassium Acetate, 20 mM Tris-Acetate, 10 mM Magnesium Acetate, 100 ug/ml BSA, pH 7.9 at 25° C.). The RNP complex was incubated with the input plasmid for 60 minutes at 37° C. The reaction was quenched with 1 mg/ml proteinase K, 0.08% SDS, and 15 mM EDTA.

[0446] As shown in FIG. 4A, CasΦ polypeptides have a preference for nicking or linearizing (i.e. cleaving both strands) a double strand plasmid DNA target and this preference is not affected by the crRNA repeat or target DNA sequence.

[0447] Raw data used to generate a subset of the heatmap in FIG. 4A is shown in FIG. 4B. These data show that CasΦ.12 is predominantly a linearizer of plasmid DNA, i.e. CasΦ.12 predominantly cleaves both strands of a double strand target DNA. Whereas CasΦ.18 is predominantly a nickase and predominantly cleaves one strand of a double strand target DNA.

[0448] This example showed that the preference of a CasΦ polypeptide to cleave a single or both strands of a double-strand target DNA is independent of the crRNA repeat or target sequence.

### Example 12

### Structural Conservation Across the CasΦ Repeats

[0449] This example describes the conservation of structure across the CasΦ repeats. In particular, FIG. 5A and FIG. 5B shows the structure of the crRNA repeats for CasΦ.1, CasΦ.2, CasΦ.7, CasΦ.11, CasΦ.12, CasΦ.13, CasΦ.18, and CasΦ.32. crRNA sequences are provided in TABLE 2. There is high sequence and structure conservation in the 3′ half of the CasΦ repeats. The LocARNA alignment tool was used to confirm the consensus structure of CasΦ repeats, which is shown in FIG. 5C. The consensus was determined on the basis of the following crRNA repeats: CasΦ.1, CasΦ.2, CasΦ.4, CasΦ.7, CasΦ.10, CasΦ.11, CasΦ.12, CasΦ.13, Cas12Φ.17, CasΦ.18, CasΦ.19, CasΦ.21, CasΦ.22, CasΦ.23, CasΦ.24, CasΦ.25, CasΦ.26, CasΦ.27, CasΦ.28, CasΦ.29, CasΦ.30, CasΦ.31, CasΦ.32, CasΦ.33, CasΦ.35, CasΦ.41. The sequence of these repeats is provided in TABLE 5. As shown in FIG. 5C and FIG. 5D, CasΦ repeats have a highly conserved 3′ hairpin which includes a double stranded stem portion and a single-stranded loop portion. One strand of the stem includes the sequence CYC and the other strand includes the sequence GRG, where Y and R are complementary. The loop portion typically comprises four nucleotides. The 3′ end of CasΦ repeats comprise the sequence GAC and the G of this sequence is in the stem of the hairpin.

[0450] This example shows the conserved structure of CasΦ crRNA repeats.

### Example 13

### CasΦ PAM Preferences on Linear Targets

[0451] The present example shows the PAM preferences for CasΦ polypeptides on linear double stranded DNA targets. For this study, five different CasΦ polypeptides (CasΦ.2, CasΦ.4, CasΦ.11, CasΦ.12 and CasΦ.18) were analyzed using a cis-cleavage assay. Amino acid sequences of the proteins used are shown in TABLE 1. The CasΦ polypeptides were complexed their native crRNAs (i.e., the corresponding CasΦ.2, CasΦ.4, CasΦ.11, CasΦ.12 and CasΦ.18 repeats) to form RNP complexes at room temperature for 20 minutes. The RNP complex was incubated with target DNA at 37° C. for 60 minutes in NEB CutSmart buffer (50 mM Potassium Acetate, 20 mM Tris-Acetate, 10 mM Magnesium Acetate, 100 ug/ml BSA, pH 7.9 at 25° C.). The target DNA was a 1.1 kb PCR-amplified DNA product. Stating with a TTTA PAM, each position was varied one by one to the other 3 nucleotides for a total of 12 variants in addition to the parental TTTA PAM. Linear fragments were used to disfavor cleavage for greater sensitivity of PAM preference determination. FIG. 6A illustrates the absolute levels of double strand cleavage (or nicking for CasΦ.18). FIG. 6B and FIG. 6C illustrate the data from FIG. 6A after normalization to the parental TTTA PAM as 100%. FIG. 6D provides a summary of the optimal PAM preferences from the data in FIG. 6A-FIG. 6C. CasΦ.2 recognizes a GTTK PAM, where K is G or T. CasΦ.4 recognizes a VTTK PAM, where Vis A, C or G and K is G or T. CasΦ.11 recognizes a VTTS PAM, where V is A, C or G and S is C or G. CasΦ.12 recognizes a TTTS PAM, where S is C or G. CasΦ.18 recognizes a VTTN PAM, where Vis A, C or G and Nis A, C, G or T.

[0452] This example shows the optimized PAM preferences for some of the CasΦ polypeptides.

### Example 14

### CasΦ Polypeptides Rapidly Nick Supercoiled DNA

[0453] The present example shows that CasΦ polypeptides rapidly nick supercoiled DNA but vary in their ability to deliver the second strand cleavage. For this study, five different CasΦ polypeptides (CasΦ.2, CasΦ.4, CasΦ.11, CasΦ.12 and CasΦ.18) were analyzed using a cis-cleavage assay. Amino acid sequences of the proteins used are shown in TABLE 1. The CasΦ polypeptides were complexed with their native crRNA to form 200 nM RNP complexes at room temperature in NEB CutSmart buffer (50 mM Potassium Acetate, 20 mM Tris-Acetate, 10 mM Magnesium Acetate, 100 ug/ml BSA, pH 7.9 at 25° C.) for 20 minutes in a volume of 30 μl. The target plasmid was one of two 2.2 kb super-coiled plasmids containing a target sequence (TATTAAATACTCGTATTGCTGTTCGATTAT (SEQ ID NO: 108) or CACAGCTTGTCTGTAAGCGGATGCCATATG (SEQ ID NO: 109), the guide RNAs targeted the underlined sequence) immediately downstream of a GTTG or TTTG PAM. At time “0” 30 μl of 20 nM target plasmid was mixed with RNP for a total volume of 60 μl. The incubation temperature was 37° C. At 1, 3, 6, 15, 30 and 60 minutes, 9 μl portions of the reaction were withdrawn and stopped with reaction quench (1 mg/ml proteinase K, 0.08% SDS and 15 mM EDTA) and allowed to deproteinize for 30 minutes at 37° C. before agarose gel analysis. The cleavage was quantified as nicked or linear. FIG. 7 shows the rapid nicking of supercoiled target DNA by CasΦ polypeptides. The decrease in nicked products over time is due to the formation of linear product as the CasΦ polypeptides cleaves the second strand of the target DNA. CasΦ.12 rapidly cleaves both strands of supercoiled DNA.

[0454] This example shows that CasΦ polypeptides rapidly nick supercoiled DNA.

### Example 15

### CasΦ Polypeptides Prefers Full Length Repeats and Spacers Form 16-20 Nucleotide

[0455] The present example shows that CasΦ polypeptides prefer full-length repeats and spacers from 16 to 20 nucleotides. For this study, each of five CasΦ polypeptides (CasΦ.2, CasΦ.4, CasΦ.11, CasΦ.12 and CasΦ.18 in FIGS. 8A and 8B) was tested for their ability to cleave input plasmid DNA when complexed with one of either of the crRNAs comprising the repeat sequences of CasΦ.2 or CasΦ.18 (abbreviated j2 and j18, respectively in FIG. 8A and FIG. 8B). Amino acid sequences of the proteins used in the experiment are shown in TABLE 1. Guide RNA sequences corresponding to j2 and j18 are provided in TABLE 2. The CasΦ polypeptides were complexed to the crRNA in NEB CutSmart Buffer (50 mM Potassium Acetate, 20 mM Tris-Acetate, 10 mM Magnesium Acetate, 100 ug/ml BSA, pH 7.9 at 25° C.) for 20 minutes at room temperature. The ability of the CasΦ polypeptides to cleave a 2.2 kb plasmid containing a target sequence was assessed (FUT8_1: ACGCGTTTTAGAAGAGCAGCTTGTTAAGGCCAAAGAACAGATTGA (SEQ ID NO: 1413) and DNMT_1: AAAGATTTGTCCTTGGAGAACGGTGCTCATGCTTACAACCGGGA (SEQ ID NO: 1414), the PAM is underlined). Spacers targeting these target sequences were shortened from the 3′ end. The cleavage incubation was at 37° C. and the reaction was quenched after 10 minutes with 1 mg/ml proteinase K, 0.08% SDS and 15 mM EDTA. To assess the effect of shortening the crRNA repeats, the repeats were shortened from the 5′ end.

[0456] As shown in FIG. 8A, cRNA repeats with a length of 19 to 37 nucleotides supported cleavage activity of CasΦ polypeptides.

[0457] As shown in FIG. 8B, cleavage activity was observed over the range of spacer lengths tested (16 to 35 nucleotides). The optimal spacer length to support the cleavage activity of CasΦ polypeptides in this in vitro system is 16 to 20 nucleotides.

[0458] This example shows that CasΦ polypeptides prefer crRNA repeat lengths of 19 to 37 nucleotides and spacer lengths of 16 to 20 nucleotides in vitro.

### Example 16

### CasΦ.12 Spacer Length Optimization in HEK293T Cells

[0459] The present example shows the use of CasΦ.12 as a gene editing tool in HEK293T cells and the effect of changing the length of the spacer. As illustrated in the schematic in FIG. 9A, a stable HEK293T cell line that expresses AcGFP was established. A plasmid expressing the crRNA under the control of the U6 promoter and CasΦ.12 under the control of the EF1a promoter was transfected into the AcGFP-expressing HEK293T cell line. The CasΦ.12 was expressed as FLAGtag-SV40NLS-Cas12j.12-NLS-T2A-PuroR. GFP expression was assessed by flow cytometry at days 5, 7 and 10. The 30 nucleotide spacer sequence is 5′-TTGCCCAGGATGTTGCCATCCTCCTTGAAA-3′ (SEQ ID NO: 1415). To assess the effect of different spacer length, the spacer was shortened from its 3′ end. As shown in FIG. 9B, a spacer length of 15 to 30 nucleotides supported CasΦ.12 cleavage activity in HEK293T cells, but with less cleavage detected with the 15 and 16 nucleotide spacers. There is a preference for CasΦ.12 to have a spacer length of 17 to 22 nucleotides, but cleavage activity is still supported with the longer spacers tested.

### Example 17

### CasΦ Nucleases are a Novel Class of Protein

[0460] This example illustrates that the CasΦ nucleases identified herein are a novel class of Cas proteins. SEQ ID NOs: 1 to 47 and SEQ ID NO. 105 were searched in the InterPro database, but were not identified as belonging to a class of protein. As an example, the results for SEQ ID NO: 2 are shown in FIG. 10A. As a positive control, the Cpf1 sequence from Acidaminococcus sp. (strain BV3L6) was also searched and was identified as a CRISPR-associated endonuclease Cas12a family member, as shown in FIG. 10B.

### Example 18

### DNA Cleavage by CasΦ.19-CasΦ.48

[0461] This example illustrates the DNA cleavage activity of CasΦ.19 to CasΦ.45. Amino acid sequences of the proteins used in the experiment are shown in TABLE 1. The CasΦ polypeptides were complexed with their native crRNA (or the crRNA of the CasΦ polypeptide with the closest match based on amino acid sequence identity) to form 100 nM RNP complexes at room temperature in NEB CutSmart buffer (50 mM Potassium Acetate, 20 mM Tris-Acetate, 10 mM Magnesium Acetate, 100 ug/ml BSA, pH 7.9 at 25° C.) for 20 minutes in a volume of 30 μl. crRNA sequences are provided in TABLE 2. The target plasmid was a 2.1 kb plasmid containing the target sequence TATTAAATACTCGTATTGCTGTTCGATTAT (SEQ ID NO: 108). The cleavage incubation was performed at 37° C. and the reaction was quenched after 60 minutes. Cleavage products where then analyzed by gel electrophoresis, as shown in FIG. 13A. This analysis identifies CasΦ.20, CasΦ.22, CasΦ.24, CasΦ.25, CasΦ.28, CasΦ.31, CasΦ.32, CasΦ.37, CasΦ.43 and CasΦ.45 as enzymes that predominantly linearize plasmid DNA, i.e. they predominantly cleave both strands of a double strand target DNA. Whereas DNA cleavage by CasΦ.21 results in mixed nicked and linear product, indicating that CasΦ.21 functions as a nickase as well as a linearizer of plasmid DNA with a preference for nickase activity under the conditions of the present study. Mixed nicked and linearized cleavage products were also identified following cleavage by CasΦ.26, CasΦ.29, CasΦ.33, CasΦ.34, CasΦ.38 and CasΦ.44 ‘SC’ represents ‘super-coiled’ un-cut target plasmid.

[0462] This example shows robust DNA cleavage by CasΦ polypeptides.

[0463] The inventors went on to demonstrate the robust generation of indels following targeting by CasΦ.12, CasΦ.20, CasΦ.21, CasΦ.22, CasΦ.25, CasΦ.28, CasΦ.31, CasΦ.32, CasΦ.33, CasΦ.34, CasΦ.37, CasΦ.43, and CasΦ.45. A stable HEK293T cell line that expresses AcGFP was established. HEK293T-AcGFP cells were transfected with crRNA and CasΦ expression plasmids using lipofectamine on day 0. Target sequences are provided in TABLE 6. Cells were harvested by trypsinization on day 3 for TIDE analysis. The target locus was amplified by PCR and the amplified product was then sequenced using Sanger sequencing. The TIDE analysis provides the frequency of indel mutations (tide.nki.nl/#about). As shown in FIG. 13B, targeting CasΦ.12, CasΦ.20, CasΦ.21, CasΦ.22, CasΦ.25, CasΦ.28, CasΦ.31, CasΦ.32, CasΦ.33, CasΦ.34, CasΦ.37, CasΦ.43, and CasΦ.45 to AcGFP led to the robust generation of indel mutations. FIG. 13C provides an alternative representation of the data shown in FIG. 13B for CasΦ.12, CasΦ.28, CasΦ.31, CasΦ.32 and CasΦ.33. These data further demonstrate the genome editing ability of CasΦ.20, CasΦ.21, CasΦ.22, CasΦ.25, CasΦ.28, CasΦ.31, CasΦ.32, CasΦ.33, CasΦ.34, CasΦ.37, CasΦ.43, and CasΦ.45.

TABLE 6

| | | PAM | PAM | SEQ ID |
|---|---|---|---|---|
| | Target Sequence | eGFP | acGFP | NO |
| KT_eGFP | TTAAGGCCAAAGAACAGATT | CTTG | CTTG | 1416 |
| OT_eGFP | CGTGATGGTCTCGATTGAGT | None | None | 1417 |
| T1_eGFP | AAGAAGTCGTGCTGCTTCAT | CTTG | CTTG | 1418 |
| T2_eGFP | ATCTGCACCACCGGCAAGCT | GTTC | GTTC | 1419 |
| T3_eGFP | TGGCGGATCTTGAAGTTCAC | GTTG | GTTG | 1420 |
| T4_eGFP | CCGTAGGTGGCATCGCCCTC | GTTC | CTTC | 1421 |
| T5_eGFP | ACGTCGCCGTCCAGCTCGAC | GTTT | None | 1422 |
| T6_eGFP | AAGAAGATGGTGCGCTCCTG | CTTG | CTCG | 1423 |

### Example 19

### PAM Requirement for CasΦ Determined by In Vitro Enrichment

[0464] This example illustrates the NTTN PAM requirement for CasΦ.2, CasΦ.4, CasΦ.11 and CasΦ.12. An in vitro enrichment (IVE) analysis was performed. The CasΦ polypeptides were complexed with crRNA to form 500 nM RNP complexes at room temperature in NEB CutSmart buffer (50 mM Potassium Acetate, 20 mM Tris-Acetate, 10 mM Magnesium Acetate, 100 ug/ml BSA, pH 7.9 at 25° C.) for 30 minutes in a volume of 25 μl. crRNA sequences are provided in TABLE 2. The cleavage incubation was performed at 37° C. and the reaction was quenched after 30 minutes. The substrate for the cleavage incubation was a pooled plasmid library which includes different PAM sequences. After quenching, the cleavage reactions were cleaned using Beckman SPRi beads. The samples were sequenced to identify which PAM sequences enabled target cleavage by the CasΦ polypeptides. As shown in FIG. 14A, this analysis revealed an NTTN PAM requirement for CasΦ.2, CasΦ.4, CasΦ.11 and CasΦ.12.

[0465] The inventors went on to assess the PAM requirement of CasΦ.20, CasΦ.26, CasΦ.32, CasΦ.38 and CasΦ.45. An IVE analysis was performed using the protocol described above for CasΦ.2, CasΦ.4, CasΦ.11 and CasΦ.12. As shown in FIG. 14B, Sanger sequencing revealed a NTNN PAM requirement for CasΦ.20, a NTTG PAM requirement for CasΦ.26, a GTTN PAM requirement for CasΦ.32 and CasΦ.38, and a NTTN PAM requirement for CasΦ.45.

[0466] The inventors also determined a single-base PAM requirement for CasΦ.20, CasΦ.24 and CasΦ.25. Amino acid sequences of the proteins used are shown in TABLE 1. The CasΦ polypeptides were complexed with their native crRNAs to form RNP complexes at room temperature for 20 minutes. crRNA sequences are provided in TABLE 2. The RNP complexes were incubated with target DNA at 37° C. for 60 minutes in NEB CutSmart buffer (50 mM Potassium Acetate, 20 mM Tris-Acetate, 10 mM Magnesium Acetate, 100 ug/ml BSA, pH 7.9 at 25° C.). The RNPs were then used in cleavage reactions with plasmid DNA comprising a target sequence and a PAM. Stating with a TTTg PAM, the PAM was mutated to each of the sequences shown in FIG. 14C to assess the PAM requirement. The products of the cleavage reactions were analyzed by gel electrophoresis, as seen in FIG. 14C. FIG. 14D provides the quantification of the gels shown in FIG. 14C. Together, the data in FIG. 14C and FIG. 14D demonstrate a NTNN PAM for DNA cleavage by CasΦ.20, CasΦ.24 and CasΦ.25.

[0467] This example demonstrates PAM sequences that enable CasΦ polypeptides to be targeted to a target sequence.

### Example 20

### CasΦ-Mediated Genome Editing in HEK293T Cells

[0468] This example illustrates the ability of CasΦ polypeptides to mediate genome editing in HEK293T cells, a cell line which is widely used in biological research. In this study, a CasΦ.12 plasmid, including both CasΦ polypeptide sequence and gRNA sequence, sometimes called an all-in-one, was delivered via lipofection. Spacers targeted exon 4 of the Fut8 gene. The spacer sequences are provided in TABLE 7. Cells were transfected on day 0 and harvested for analysis on day 5. As shown in FIG. 15, the target locus was modified following delivery of CasΦ.12 and gRNA 2. Cas9 was delivered to HEK293T cells to provide a positive control and no modification was detected when a non-targeting (NT) gRNA was used. The presence of indels was confirmed by next generation sequence analysis. The sample targeted by CasΦ.12 and gRNA 2 is shown in FIG. 15. The next generation sequence analysis revealed a diverse pattern of indels. The most frequent mutations were deletion mutations of 4 to 18 base pairs. The frequency of mutations was quantified and is illustrated as “% modified”, which is defined as the % of modification in the DNA sequence when aligned to unedited cells. Modifications can be deletions, insertions and substitutions.

[0469] This example demonstrates the use of CasΦ.12 as a robust genome editing tool.

TABLE 7

| | | Spacer sequence |
|---|---|---|
| Name | Target | (5′ → 3′) [SEQ ID NO] |
| Fut8_1 | CasPhi target | GAAGAGCAGCTTGTTAAGGC |
| | | (SEQ ID NO: 1424) |
| Fut8_2 | CasPhi target | GCCTTAACAAGCTGCTCTTC |
| | | (SEQ ID NO: 1425) |
| Fut8_3 | Cas9 target | ATTGATCAGGGGCCAgctat |
| | (control) | (SEQ ID NO: 1426) |
| Fut8_4 | Cas9 target | Acgcgtactcttcctatagc |
| | (control) | (SEQ ID NO: 1427) |
| Nt | Non target | CGTGATGGTCTCGATTGAGT |
| | | (SEQ ID NO: 1428) |

### Example 21

### CasΦ-Mediated Genome Editing in CHO Cells

[0470] This example illustrates the ability of CasΦ polypeptides to mediate genome editing in CHO cells, an epithelial cell line which is frequently used in biological and medical research. To test the function of CasΦ.12 in CHO cells, 40 pmol CasΦ.12 was complexed to its native crRNA (2.5:1 crRNA: CasΦ). To prepare a mastermix of CasΦ.12 RNP, 3 μl crRNA (at 100 nM) was added to 1.6 μl CasΦ.12 (at 75 μM). Spacer sequences are provided in Table 8. The RNP complexes were incubated at 37° C. for 30 minutes. CHO cells were resuspended at 1.2×10⁶ cells/ml in SF solution (Lonza). 40 μl of the cell suspension was added to the RNP complexes and 20 μl of the resultant suspension was then transferred to individual tubes for nucleofection. Lonza setting FF-137 was used to nucleofect the CHO cells. Cells were then harvested for analysis on day 5. As shown in FIG. 16A, CasΦ.12 induced the generation of indels in each of the endogenous genes tested (Bak1, Bax and Fut8). The ability of CasΦ.12 to induce indel mutations in each of these genes is further shown in FIG. 16F for Bak1, FIG. 16G for Bax and FIG. 16H for Fut8. Spacer sequences for FIG. 16F, FIG. 16G and FIG. 16H are provided in Tables F, G, and H, respectively. The data shown in FIG. 16F-H were produced with 200,000 CHO cells per transfection, RNP complexed with 250 pmol of CasΦ.12, and full-length unmodified guide RNA in molar excess relative to CasΦ.12, using the same Lonza reagents described for producing data presented in FIGS. 16A-E.

TABLE 8

| | Spacer sequence | Repeat+Spacer sequence |
|---|---|---|
| Name | (5′ → 3′) | (5′ → 3′), shown as DNA |
| Bak1_1 | GAAGCTATGTTTTCCAT | CTTTCAAGACTAATAGATTGCTCCTTACGA |
| | CTC (SEQ ID NO: 443) | GGAGACGAAGCTATGTTTTCCATCTC (SEQ |
| | | ID NO: 1197) |
| Bak1_2 | GCAGGGGCAGCCGCCC | CTTTCAAGACTAATAGATTGCTCCTTACGA |
| | CCTG | GGAGACGCAGGGGCAGCCGCCCCCTG |
| | (SEQ ID NO: 444) | (SEQ ID NO: 1198) |
| Bak1_3 | CTCCTAGAACCCAACA | CTTTCAAGACTAATAGATTGCTCCTTACGA |
| | GGTA | GGAGACCTCCTAGAACCCAACAGGTA |
| | (SEQ ID NO: 445) | (SEQ ID NO: 1199) |
| Bak1_4 | GAAAGACCTCCTCTGTG | CTTTCAAGACTAATAGATTGCTCCTTACGA |
| | TCC (SEQ ID NO: 446) | GGAGACGAAAGACCTCCTCTGTGTCC (SEQ |
| | | ID NO: 1200) |
| Bak1_5 | TCCATCTCGGGGTTGGC | CTTTCAAGACTAATAGATTGCTCCTTACGA |
| | AGG (SEQ ID NO: 447) | GGAGACTCCATCTCGGGGTTGGCAGG |
| | | (SEQ ID NO: 1201) |
| Bak1_6 | TTCCTGATGGTGGAGAT | CTTTCAAGACTAATAGATTGCTCCTTACGA |
| | GGA (SEQ ID NO: 448) | GGAGACTTCCTGATGGTGGAGATGGA |
| | | (SEQ ID NO: 1202) |
| Bax_1 | CTAATGTGGATACTAAC | CTTTCAAGACTAATAGATTGCTCCTTACGA |
| | TCC (SEQ ID NO: 479) | GGAGACCTAATGTGGATACTAACTCC (SEQ |
| | | ID NO: 1269) |
| Bax_2 | TTCCGTGTGGCAGCTGA | CTTTCAAGACTAATAGATTGCTCCTTACGA |
| | CAT (SEQ ID NO: 480) | GGAGACTTCCGTGTGGCAGCTGACAT (SEQ |
| | | ID NO: 1270) |
| Bax_3 | CTGATGGCAACTTCAAC | CTTTCAAGACTAATAGATTGCTCCTTACGA |
| | TGG(SEQ ID NO: 481) | GGAGACCTGATGGCAACTTCAACTGG |
| | | (SEQ ID NO: 1271) |
| Bax_4 | TACTTTGCTAGCAAACT | CTTTCAAGACTAATAGATTGCTCCTTACGA |
| | GGT (SEQ ID NO: 482) | GGAGACTACTTTGCTAGCAAACTGGT (SEQ |
| | | ID NO: 1272) |
| Bax_5 | AGCACCAGTTTGCTAGC | CTTTCAAGACTAATAGATTGCTCCTTACGA |
| | AAA (SEQ ID NO: 483) | GGAGACAGCACCAGTTTGCTAGCAAA |
| | | (SEQ ID NO: 1273) |
| Bax_6 | AACTGGGGCCGGGTTG | CTTTCAAGACTAATAGATTGCTCCTTACGA |
| | TTGC (SEQ ID NO: 484) | GGAGACAACTGGGGCCGGGTTGTTGC |
| | | (SEQ ID NO: 1274) |
| Fut8_1 | CCACTTTGTCAGTGCGT | CTTTCAAGACTAATAGATTGCTCCTTACGA |
| | CTG (SEQ ID NO: 507) | GGAGACCCACTTTGTCAGTGCGTCTG (SEQ |
| | | ID NO: 1325) |
| Fut8_2 | CTCAATGGGATGGAAG | CTTTCAAGACTAATAGATTGCTCCTTACGA |
| | GCTG (SEQ ID NO: 508) | GGAGACCTCAATGGGATGGAAGGCTG |
| | | (SEQ ID NO: 1326) |
| Fut8_3 | AGGAATACATGGTACA | CTTTCAAGACTAATAGATTGCTCCTTACGA |
| | CGTT (SEQ ID NO: 509) | GGAGACAGGAATACATGGTACACGTT |
| | | (SEQ ID NO: 1327) |
| Fut8_4 | AAGAACATTTTCAGCTT | CTTTCAAGACTAATAGATTGCTCCTTACGA |
| | CTC (SEQ ID NO: 510) | GGAGACAAGAACATTTTCAGCTTCTC (SEQ |
| | | ID NO: 1328) |
| Fut8_5 | ATCCACTTTCATTCTGC | CTTTCAAGACTAATAGATTGCTCCTTACGA |
| | GTT (SEQ ID NO: 511) | GGAGACATCCACTTTCATTCTGCGTT (SEQ |
| | | ID NO: 1329) |
| Fut8_6 | TTTGTTAAAGGAGGCA | CTTTCAAGACTAATAGATTGCTCCTTACGA |
| | AAGA(SEQ ID NO: 512) | GGAGACTTTGTTAAAGGAGGCAAAGA |
| | | (SEQ ID NO: 1330) |

[0471] The inventors went on to demonstrate the ability of CasΦ.12 to mediate gene editing via the homology directed repair pathway. The inventors tested DNA donor oligos with 25 bp, 50 bp or 90 bp homology arms (HA), as shown in FIG. 16B. The donor oligos were delivered to CHO cells with or without CasΦ.12 and crRNA. As seen in FIG. 16C, indels were not detected in the absence of CasΦ.12. Whereas, indels were detected in the presence of CasΦ.12 and confirmed by sequencing the endogenous targeted locus (FIG. 16D). The sequencing analysis also showed the successful incorporation of a DNA donor oligo into the endogenous targeted locus (FIG. 16E).

[0472] The inventors further demonstrated the ability of CasΦ.12 to mediate gene editing of Bax and Fut8 genes via the homology directed repair pathway. In this additional study, DNA donor oligos with 20 bp, 25 bp, 30 bp or 40 bp 90 bp HA were used, shown in FIG. 16I. These DNA donor oligos were either unmodified or modified with phosphorothioate (PS) bonds between the first 5′, and the last two 3′ bases. As shown in FIG. 16J, CasΦ.12 mediated successful incorporation of a DNA donor oligo into the endogenous targeted locus. Finally, the inventors further optimized CasΦ.12-mediated genome editing of Fut8 using AAV6 delivery of the DNA donor. In this study, CHO cells were transfected with Fut8-targeting RNP (500 pmol) using Lonza nucleofection protocols. AAV6 donors at different MOIs were added to cells immediately after transfection. The frequency of indels and HDR was analyzed by NGS. As shown in FIG. 16K and FIG. 16L, CasΦ.12 induced the generation of indels and HDR.

[0473] These data further demonstrate the utility of CasΦ polypeptides as a genome editing tool.

### Example 22

### CasΦ-Mediated Genome Editing in K562 Cells

[0474] This example illustrates the ability of CasΦ polypeptides to mediate genome editing in K562 cells, a myelogenous leukemia cell line which is particularly useful for biological and medical research by virtue of its amenability for nucleofection by electroporation. In this study, K562 cells were nucleofected with Cas9 or CasΦ.12. To nucleofect the cells, 150,000 cells in SF solution (SF Cell Line 96 Amaxa) were added to the amount of plasmid (expressing the gRNA targeting the Fut8 gene and either Cas9 or CasΦ.12) indicated in FIG. 17. Amaxa program 96-FF-120 was used to nucleofect the cells. The cells were harvested two days after nucleofection and the frequency of indel mutations was determined. As shown in FIG. 17, as the amount of CasΦ.12 plasmid increased, the amount of indels detected in the endogenous Fut8 gene also increased.

### Example 23

### CasΦ-Mediated Genome Editing in Primary Cells

[0475] This example illustrates the ability of CasΦ polypeptides to mediate genome editing in primary cells, such as T cells. In this study, CasΦ.12 was delivered to human T cells. CasΦ.12 was complexed to its native crRNA comprising the spacer sequence 5′-GGGCCGAGAUGUCUCGCUCC-3′ (SEQ ID NO: 1429). Complexes were formed in a 3:1 ratio of crRNA:protein. For nucleofection, 50 pmol RNP was mixed with 320,000 cells per well and the Amaxa EH115 program was used. Immediately after nucleofection, 80 μl pre-warmed culture medium was added to each well. The cells were then left in the cuvette plate for 15 minutes before transfer to the culture plate. Genomic DNA was extracted from cells on day 3 and day 5. Flow cytometry analysis was performed on day 5. As shown in FIG. 18A, when CasΦ.12 was delivered with a gRNA targeting the endogenous beta-2 microglobulin (B2M) gene, a distinct population of B2M-negative cells was detected by flow cytometry analysis demonstrating the CasΦ.12-mediated knockout of the endogenous B2M gene. In the absence of the B2M-targeting gRNA, the population of B2M-negative cells was not observed by flow cytometry. Indels were confirmed by next generation sequencing analysis, as shown FIG. 18C, and quantified, as shown in FIG. 18B.

[0476] The inventors went on to use CasΦ.12 to target the T-cell receptor alpha-constant (TRAC) gene. Knockout of the TRAC gene prevents expression of the T cell receptor. Accordingly, TRAC knockout T cells are beneficial for T cell therapies (e.g. CAR-T cell therapies) because TRAC knockout T cells have a longer half-life in vivo as the T cells have less potential to attack the recipient's normal cells. In this study, CasΦ.12 and gRNA targeting the TRAC gene (CasPhi1 or CasPhi7) were delivered to T cells. As shown in FIG. 18D, the delivery of the CasΦ.12 and the gRNA resulted in a population of TRAC-negative cells, which were detected by flow cytometry. The inventors went on to confirm the presence of indel mutations by sequencing the target locus. As shown in FIG. 18E, the sequence analysis revealed insertion, deletion and substitution mutations at the endogenous targeted locus. The frequency of indel mutations was quantified, as shown in FIG. 18F.

[0477] These data demonstrate the utility of CasΦ polypeptides as a robust genome editing tool in primary human cells.

### Example 24

### Separable DNA Strand Cleavage Reactions of CasΦ Nucleases

[0478] This example further illustrates the mechanism of DNA strand cleavage by CasΦ polypeptides. In this study, CasΦ.4, CasΦ.12 and CasΦ.18 were complexed with their native crRNA. RNP complexes were formed by a 20 minute incubation at room temperature. The target plasmid was a 2.1 kb plasmid containing the target sequence TATTAAATACTCGTATTGCTGTTCGATTAT (SEQ ID NO: 108). The cleavage reaction was carried out at 37° C. and had a duration of 30 minutes. The cleavage products were then analyzed by gel electrophoresis. As shown in FIG. 19, CasΦ polypeptides nick supercoiled (sc) DNA by cleaving the non-target DNA strand. Some CasΦ polypeptides, such as CasΦ.4 and CasΦ.12, then go on to cleave the second (target) strand to generate a linear product from a plasmid target. Whereas some CasΦ polypeptides, such as CasΦ.18, function as nickases and do not go on to cleave the second strand. CasΦ cleavage activity is dependent on metal cations, such as Mg²⁺. Varying the concentration of Mg²⁺ allows the cleavage of the first strand and then second strand by CasΦ.4 and CasΦ.12 to be visualized. As the concentration of Mg²⁺ increases, the amount of linearized product detected increases indicating that the second strand has been cleaved in the CasΦ.4 and CasΦ.12 reactions.

### Example 25

### Detection of a Target Nucleic Acid by CasΦ Polypeptides

[0479] This example illustrates the use of CasΦ.4 and CasΦ.18 in a nucleic acid detection assay by virtue of trans cleavage activity of ssDNA. In this study, 100 nM RNP was prepared and used in a detection assay. In the detection assay, the target dsDNA was at a concentration of 10 nM and the ssDNA reporter molecule was at a concentration of 100 nM. The target dsDNA included 5 target sequences, which were targeted by a pool of 5 gRNAs) with 7 base pairs flanking the 20 nucleotide target sequences on both 5′ and 3′ sides, as shown in FIG. 20. The detection assay was carried out at 37° C. The buffer conditions provided in TABLE 9 were tested in the detection assay. All buffers were supplemented with 0.1 mg/ml BSA and 1 mM TCEP. As seen in FIG. 20, when a gRNA (complexed to a CasΦ polypeptide) hybridizes to a target nucleic acid, the CasΦ's trans cleavage activity is activated such that a labeled ssDNA reporter is degraded. The degradation of the ssDNA reporter is detected as fluorescence thus allowing CasΦ polypeptides to be used in assays to achieve fast and high-fidelity detection of target nucleic acid molecules in a sample. As shown in FIG. 20, high pH (e.g. 8-9) and high Mg²⁺ concentration (e.g. 12-15 mM) provided preferred conditions for the detection assay.

TABLE 9

| buffer ID # | pH | 1X NaCl (mM) | 1X MgCl₂ (mM) |
|---|---|---|---|
| 1 | 9 | 150 | 15 |
| 2 | 9 | 150 | 3 |
| 3 | 7.5 | 0 | 3 |
| 4 | 9 | 0 | 3 |
| 5 | 9 | 0 | 15 |
| 6 | 7.5 | 150 | 3 |
| 7 | 7.5 | 150 | 15 |
| 8 | 8 | 37.5 | 3 |
| 9 | 8.5 | 150 | 12 |
| 10 | 7.5 | 0 | 15 |
| 11 | 8.5 | 0 | 6 |
| 12 | 9 | 150 | 3 |
| 13 | 9 | 0 | 3 |
| 14 | 9 | 150 | 15 |
| 15 | 8 | 150 | 6 |
| 16 | 7.5 | 150 | 15 |
| 17 | 8 | 112.5 | 15 |
| 18 | 9 | 0 | 15 |
| 19 | 7.5 | 150 | 3 |
| 20 | 8.5 | 112.5 | 3 |
| 21 | 8.5 | 37.5 | 12 |
| 22 | 7.5 | 0 | 3 |
| 23 | 8.5 | 112.5 | 6 |
| 24 | 7.5 | 37.5 | 6 |
| 25 | 8 | 0 | 12 |
| 26 | 7.5 | 112.5 | 6 |
| 27 | 8.5 | 37.5 | 15 |
| 28 | 9 | 37.5 | 6 |
| 29 | 9 | 112.5 | 12 |
| 30 | 7.5 | 37.5 | 12 |
| 31 | 7.5 | 0 | 15 |
| 32 | 7.5 | 112.5 | 12 |

[0480] These data demonstrate the utility of CasΦ polypeptides in nucleic acid detection assays.

### Example 26

### High Efficiency of CasΦ Polypeptide-Mediated Genome Editing in Primary Cells

[0481] The present example shows that CasΦ.12 mediates high genome editing efficiency that is comparable the editing efficiency mediated by Cas9. Results of the study are shown in FIG. 21. In this study, CasΦ.12 mRNA (SEQ ID NO: 107) with a gRNA (CUUUCAAGACUAAUAGAUUGCUCCUUACGAGGAGACGGGCCGAGAUGUCUCGCUCC (SEQ ID NO: 1430)); spacer sequence is bold and underlined) or Cas9 mRNA with a gRNA (GGCCGAGATGTCTCGCTCCG (SEQ ID NO: 1431)) was delivered to T cells. gRNAs used in this study targeted the B2M gene. For nucleofection, T cells were resuspended in BTXpress electroporation medium (5×10⁵ cells per well) and mixed with CasΦ.12 or Cas9 mRNA and 500 pmol gRNA. Cells were collected on day 2 for extraction of genomic DNA, and the frequency of indel mutations was determined. As shown in FIG. 21A, when 20 μg of CasΦ.12 mRNA was delivered with gRNA to T cells, high genome editing efficiency was achieved, and this was at a similar level to of genome editing achieved using Cas9. Cells were also collected on Day 2 for flow cytometry to determine the frequency of B2M knockout. As shown in FIG. 21B and quantified in FIG. 21A, a similar percentage of B2M-negative cells were detected after delivery of CasΦ.12 or Cas9 mRNA. Accordingly, this example demonstrates high efficiency of CasΦ polypeptide-mediated genome efficiency in primary cells.

### Example 27

### CasΦ Polypeptide-Mediated Genome Editing in CHO Cells

[0482] This present example describes the identification of optimized gRNAs for CasΦ.12-mediated genome editing in CHO cells. In this study, CasΦ.12 polypeptides (SEQ ID NO: 107) were complexed with a gRNA shown in TABLE 10. CHO cells were resuspended in SF solution and Lonza setting FF-137 was used to nucleofect the cells (200,000 cells per well) with 250 pmol RNP. Genomic DNA was extracted and the presence of indels was confirmed by next generation sequence analysis. FIG. 22A shows the frequency of indel mutations induced by CasΦ.12 polypeptides complexed with a 2′fluoro modified gRNA. As shown in FIG. 22B, gRNAs with ˜20% or greater editing efficiency were identified.

TABLE 10

| | Spacer sequence | RNA sequence (5′ → 3′), |
|---|---|---|
| Name | (5′ → 3′) | shown as DNA |
| R2849_Bakl_nsd_ | CTGACTCCCAGCTCTGA | CTTTCAAGACTAATAGATTGCTCC |
| sg1 | CCC (SEQ ID NO: 449) | TTACGAGGAGACCTGACTCCCAG |
| | | CTCTGACCC (SEQ ID NO: 1203) |
| R2855_Bak1_nsd_ | CCATCTCCACCATCAGG | CTTTCAAGACTAATAGATTGCTCC |
| sg7 | AAC (SEQ ID NO: 455) | TTACGAGGAGACCCATCTCCACC |
| | | ATCAGGAAC (SEQ ID NO: 1209) |
| R3977 | TCCAGACGCCATCTTTCA | CTTTCAAGACTAATAGATTGCTCC |
| Bak1_exon1_sg1 | GG | TTACGAGGAGACTCCAGACGCCA |
| | (SEQ ID NO: 465) | TCTTTCAGG (SEQ ID NO: 1219) |
| R3978 | TGGTAAGAGTCCTCCTG | CTTTCAAGACTAATAGATTGCTCC |
| Bakl_exon1_sg2 | CCC | TTACGAGGAGACTGGTAAGAGTC |
| | (SEQ ID NO: 466) | CTCCTGCCC (SEQ ID NO: 1220) |
| R3979 | TTACAGCATCTTGGGTC | CTTTCAAGACTAATAGATTGCTCC |
| Bak1_exon3_sg1 | AGG | TTACGAGGAGACTTACAGCATCT |
| | (SEQ ID NO: 467) | TGGGTCAGG (SEQ ID NO: 1221) |
| R3980 | GGTCAGGTGGGCCGGCA | CTTTCAAGACTAATAGATTGCTCC |
| Bak1_exon3_sg2 | GCT | TTACGAGGAGACGGTCAGGTGGG |
| | (SEQ ID NO: 468) | CCGGCAGCT (SEQ ID NO: 1222) |
| R3981 | CTATCATTGGAGATGAC | CTTTCAAGACTAATAGATTGCTCC |
| Bak1_exon3_sg3 | ATT | TTACGAGGAGACCTATCATTGGA |
| | (SEQ ID NO: 469) | GATGACATT (SEQ ID NO: 1223) |
| R3982 | GAGATGACATTAACCGG | CTTTCAAGACTAATAGATTGCTCC |
| Bak1_exon3_sg4 | AGA | TTACGAGGAGACGAGATGACATT |
| | (SEQ ID NO: 470) | AACCGGAGA (SEQ ID NO: 1224) |
| R3983 | TGGAACTCTGTGTCGTAT | CTTTCAAGACTAATAGATTGCTCC |
| Bak1_exon3_sg5 | CT | TTACGAGGAGACTGGAACTCTGT |
| | (SEQ ID NO: 471) | GTCGTATCT (SEQ ID NO: 1225) |
| R3984 | CAGAATTTACTGGAGCA | CTTTCAAGACTAATAGATTGCTCC |
| Bak1_exon3_sg6 | GCT | TTACGAGGAGACCAGAATTTACT |
| | (SEQ ID NO: 472) | GGAGCAGCT (SEQ ID NO: 1226) |
| R3985 | ACTGGAGCAGCTGCAGC | CTTTCAAGACTAATAGATTGCTCC |
| Bak1_exon3_sg7 | CCA | TTACGAGGAGACACTGGAGCAGC |
| | (SEQ ID NO: 473) | TGCAGCCCA (SEQ ID NO: 1227) |
| R3986 | CCAGCTGTGGGCTGCAG | CTTTCAAGACTAATAGATTGCTCC |
| Bak1_exon3_sg8 | CTG | TTACGAGGAGACCCAGCTGTGGG |
| | (SEQ ID NO: 474) | CTGCAGCTG (SEQ ID NO: 1228) |
| R3987 | GTAGGCATTCCCAGCTG | CTTTCAAGACTAATAGATTGCTCC |
| Bak1_exon3_sg9 | TGG | TTACGAGGAGACGTAGGCATTCC |
| | (SEQ ID NO: 475) | CAGCTGTGG (SEQ ID NO: 1229) |
| R3988 | GTGAAGAGTTCGTAGGC | CTTTCAAGACTAATAGATTGCTCC |
| Bak1_exon3_sg10 | ATT | TTACGAGGAGACGTGAAGAGTTC |
| | (SEQ ID NO: 476) | GTAGGCATT (SEQ ID NO: 1230) |
| R3989 | ACCAAGATTGCCTCCAG | CTTTCAAGACTAATAGATTGCTCC |
| Bak1_exon3_sg11 | GTA | TTACGAGGAGACACCAAGATTGC |
| | (SEQ ID NO: 477) | CTCCAGGTA (SEQ ID NO: 1231) |
| R3990 | CCTCCAGGTACCCACCA | CTTTCAAGACTAATAGATTGCTCC |
| Bak1_exon3_sg12 | CCA | TTACGAGGAGACCCTCCAGGTAC |
| | (SEQ ID NO: 478) | CCACCACCA (SEQ ID NO: 1232) |

### Example 28

### Minimal Off-Target Effects of CasΦ Polypeptides

[0483] This example illustrates the off-target profiles of CasΦ.12 and Cas9. A major challenge in the translation of CRISPR/Cas9 technology into the clinic has been overcoming off-target effects. Off-target effects arise where a gRNA tolerates mismatches in complementarity of the gRNA and target sequence, and so the gRNA hybridizes to a sequence that is not the target sequence. Off-target effects are a source of major concern as it is important to avoid the production in unnecessary mutations that could be detrimental. In this study, CIRCLE-seq was performed to detect off-target sites (Tsai et al. 2017 Nature Methods). Sequencing was performed on genomic DNA extracted from CHO cells that had been transfected with CasΦ.12 polypeptide (SEQ ID NO: 107) and a gRNA targeting Fut8, CasΦ.12 polypeptide and a gRNA targeting BAX or Cas9 polypeptide and a gRNA targeting BAX. As shown in FIG. 23A, CasΦ.12 targeting Fut8 induced minimal off-target mutations. FIG. 23D shows the off-target mutations induced by Cas9 editing of Fut8. Similarly, CasΦ.12 targeting BAX induced minimal off-target mutations, as shown in FIG. 23B. Cas9 targeting BAX induced a higher percentage of off-targets mutations, as shown in FIG. 23C, compared to CasΦ.12. Cas9 targeting Bak1 also induced a higher percentage of off-targets mutations, as shown in FIG. 23E, compared to CasΦ.12, as shown in FIG. 23F.

[0484] In a further study, GUIDE-Seq was performed to detect off-target sites (Tsai et al. 2015 Nature Biotechnology). Sequencing was performed on genomic DNA extracted from HEK293 cells following delivery of either CasΦ.12 polypeptide or Cas9 polypeptide and a gRNA targeting human Fut8. As shown in FIG. 23G, no off target mutations were detected in the CasΦ.12 polypeptide sample. Whereas, several off-target mutations were detected in Cas9 polypeptide sample, as shown in FIG. 23H. Accordingly, this example demonstrates that CasΦ polypeptides have fewer off-target effects than Cas9.

### Example 29

### CasΦ Polypeptide-Mediated Genome Editing Via Homology Directed Repair (HDR)

[0485] The present example illustrates the ability of that CasΦ.12 to mediate HDR. In this study, CasΦ.12 polypeptide (SEQ ID NO: 107) was complexed with a gRNA (CUUUCAAGACUAAUAGAUUGCUCCUUACGAGGAGACGAGUCUCUCAGCUGGUAC AC (SEQ ID NO: 1432)) targeting the TRAC gene and delivered to T cells. RNP complexes were formed by a 10 minute incubation at room temperature. T cells were resuspended at 5×10⁵ cells/20 μL in electroporation solution (Lonza). T cells were nucleofected using the Amaxa P3 kit and Amaxa 4D Nucleofector with pulse code EH115. Immediately after nucleofection, 80 μl pre-warmed culture medium was added to each well. The cells were then left in the cuvette plate for 10 minutes before transfer to the culture plate. Cells were harvested and genomic DNA was extracted. The frequency of indel mutations HDR was determined and shown in FIG. 24A. The frequency of indel mutations and HDR was combined to determine the frequency of modification. Flow cytometry was also performed to determine the frequency of TRAC knockout, as assessed by the loss of CD3 at the cell surface. FIG. 24A shows CasΦ.12-mediated gene editing via the HDR pathway. FIG. 24B shows a schematic of the donor oligonucleotide. Thus, this example demonstrates the use of CasΦ polypeptides as robust genome editing tools.

### Example 30

Multiplex Genome Editing with CasΦ Polypeptides

[0486] This example illustrates the ability of CasΦ RNP complexes to target multiple genes simultaneously. In this study, gRNAs targeting B2M or TRAC were incubated with CasΦ.12 polypeptides (SEQ ID NO: 107) for 10 minutes at room temperature to form RNP complexes. RNP complexes were formed with a variety of gRNAs with different modifications (unmodified, 2′-O-methyl on the last 3′ nucleotide of the crRNA (1me), 2′-O-methyl on the last two 3′ nucleotides of the crRNA (2me) and 2′-O-methyl on the last three 3′ nucleotides of the crRNA (3me)) and with different repeat and spacer sequences (20-20, which corresponds to 20 nucleotide repeat and 20 nucleotide spacer, and 20-17, which corresponds to 20 nucleotide repeat and 17 nucleotide spacer), as shown in TABLE 11. B2M targeting RNPs, TRAC targeting RNPs or B2M targeting RNPs and TRAC targeting RNPs were added to T cells. T cells were resuspended at 5×10⁵ cells/20 μL in Nucleofection P3 solution and an Amaxa 4D 96-well electroporation system with pulse code EH115 was used to nucleofect the cells. Immediately after nucleofection, 85 μl pre-warmed culture medium was added to each well. The cells were then left in the cuvette plate for 10 minutes before transfer to the culture plate. On Day 3, genomic DNA was extracted. On Day 5, cells were harvested for flow cytometry. Quantification of the percentage of B2M-negative and CD3-negative cells is shown in FIG. 25A for gRNAs with a repeat length of 20 nucleotides and a spacer length of 20 nucleotides, and in FIG. 25B for gRNAs with a repeat length of 20 nucleotides and a spacer length of 17 nucleotides. Corresponding flow cytometry panels can be seen in FIGS. 25C and 25D for gRNAs of different repeat and spacer lengths and with different modifications.

[0487] In a further study, RNP complexes were formed using CasΦ.12 and modified gRNAs (unmodified, 1me, 2me, 3me, 2′-fluoro on the last 3′ nucleotide of the crRNA (1F), 2′-fluoro on the last two 3′ nucleotides of the crRNA (2F) and 2′-fluoro on the last three 3′ nucleotides of the crRNA (3F)) with different lengths of spacer sequences (20-20 and 20-17 as above) that target TRAC. T cells were nucleofected with RNP complexes (125 pmol) using the P3 primary cell nucleofection kit and an Amaxa 4D 96-well electroporation system with pulse code EH115. As shown in FIG. 25E, ˜90% editing efficiency was achieved using CasΦ.12 and modified gRNAs. FIG. 25F shows a flow cytometry plot illustrating ˜90% TRAC knockout in T cells after delivery of CasΦ.12 and modified gRNAs. This data further demonstrates the ability of CasΦ to mediate high efficiency genome editing.

TABLE 11

| | | | Repeat | Spacer | |
|---|---|---|---|---|---|
| | | | sequence | sequence | crRNA sequence |
| Name | Target | Modification | (5′ → 3′) | (5′ → 3′) | (5′ → 3′) |
| R3150 | B2M | Unmodified, | AUUGCUC | CAGUGGGGG | AUUGCUCCUUAC |
| 20-20 | Exon 2 | 2′OMe at last | CUUACGA | UGAAUUCAG | GAGGAGACCAG |
| | | 3′ base (1me) | GGAGAC | UG (SEQ ID | UGGGGGUGAAU |
| | | 2′OMe at last | (SEQ ID NO: | NO: 1434) | UCAGUG (SEQ ID |
| | | two 3′ bases | 1433) | | NO: 1435) |
| | | (2me) | | | |
| | | 2′OMe at last | | | |
| | | three 3′ bases | | | |
| | | (3me) | | | |
| R3042 | TRAC | Unmodified, | AUUGCUC | GAGUCUCUC | AUUGCUCCUUAC |
| 20-20 | Exon 1 | 1me | CUUACGA | AGCUGGUAC | GAGGAGACGAG |
| | | 2me | GGAGAC | AC (SEQ ID | UCUCUCAGCUGG |
| | | 3me | (SEQ ID NO: | NO: 1436) | UACAC (SEQ ID |
| | | | 1433) | | NO: 1437) |
| R3150 | B2M | Unmodified, | AUUGCUC | CAGUGGGGG | AUUGCUCCUUAC |
| 20-17 | Exon 2 | 1me | CUUACGA | UGAAUUCA | GAGGAGACCAG |
| | | 2me | GGAGAC | (SEQ ID NO: | UGGGGGUGAAU |
| | | 3me | (SEQ ID NO: | 1438) | UCA (SEQ ID NO: |
| | | | 1433) | | 1439) |
| R3042 | TRAC | Unmodified, | AUUGCUC | CAGUGGGGG | AUUGCUCCUUAC |
| 20-17 | Exon 1 | 1me | CUUACGA | UGAAUUCA | GAGGAGACGAG |
| | | 2me | GGAGAC | (SEQ ID NO: | UCUCUCAGCUGG |
| | | 3me | (SEQ ID NO: | 1440) | UA (SEQ ID NO: |
| | | | 1433) | | 1441) |

### Example 31

CasΦ Polypeptides have an Extended Seed Region

[0488] The present example shows that CasΦ.12 has an extended seed region compared to Cas9 and does not tolerate mismatches in the complementarity of the spacer and target sequences within the first 1-16 nucleotides from the 5′ of the spacer sequence. In this study, CasΦ.12 (SEQ ID NO: 107) was complexed with a gRNA targeting TRAC gene and delivered to T cells. Spacer sequences contained a single mismatch at the position indicated in FIG. 26A or a mismatch at each of the two positions indicated in FIG. 26B. Mismatches were generated by substituting a purine for a purine (i.e. A to G and vice versa) and a pyrimidine for a pyrimidine (i.e. U to C and vice versa). RNP complexes were formed by a 10 minute incubation at room temperature. T cells were resuspended at 5×10⁵ cells/20 μL in electroporation solution (Lonza). Amaxa P3 kit and Amaxa 4D Nucleofector was used to nucleofect the T cells. Immediately after nucleofection, 80 μl pre-warmed culture medium was added to each well. The cells were then left in the cuvette plate for 10 minutes before transfer to the culture plate. Cells were harvested for extraction of genomic DNA to determine the frequency of indel mutations and for flow cytometry to determine the percentage of CD3 knockout cells. As shown in FIG. 26A, no indel mutations or CD3 knockout were detected when there was a single mismatch in the complementarity of the spacer and target sequences at positions 1-16 from the 5′ end of the spacer sequence. Similarly, no indels or CD3 knockout cells were detected when there was a double mismatch in the complementarity of the spacer and target sequences at positions 1-16 from the 5′ end of the spacer sequence as shown in FIG. 26B. The data shown in FIG. 26A and FIG. 26B demonstrate that CasΦ polypeptides do not tolerate mismatches in complementarity between the spacer sequence and target sequence in the 5′ 16 positions of the spacer. This region in which mismatches are not tolerated is known as the “seed region”. Thus the seed region of CasΦ.12 is the first 16 bases from the 5′ end of the spacer. In contrast, the seed region of Cas9 is much shorter and is reported to be only 5 nucleotides long (Wu et al., Quant Biol. 2014 June; 2(2): 59-70). Shorter seed regions result in increased likelihood of off-target effects because the likelihood of mismatches between the spacer and target occurring outside the seed region is increased. Accordingly, longer seed regions result in a reduced likelihood of off-target effects. The long seed region of CasΦ.12 is therefore advantageous over the short seed region of Cas9 and contributes to the reduced off-target effects of CasΦ.12. FIG. 26C and FIG. 26D provide schematics of the gRNAs with mismatches.

### Example 32

Use of Modified Guide RNAs with CasΦ Polypeptides

[0489] This example illustrates the ability of CasΦ.12 to mediate genome editing in CHO cells with modified gRNAs. In this study, RNP complexes were formed using CasΦ.12 polypeptide (SEQ ID NO: 107) and a modified gRNA shown in TABLE 12. For nucleofection, 200 pmol RNP was mixed with 200,000 cells per well. CHO cells were resuspended in SF solution and Lonza setting FF-137 was used to nucleofect the cells. Genomic DNA was extracted 48 hours after transfection and the frequency of indel mutations was determined. As shown in FIG. 27A, several modified gRNAs with editing efficiency of ˜10% were identified. In a further study, additional modified gRNAs were tested. As shown in FIG. 27B, modified gRNAs with editing efficiency of up to 40-50% were identified.

[0490] gRNAs with phosphorothioate (PS) backbone modifications, 2′-fluoro (2′-F) and 2′-O-Methyl (2′OMe) sugar modifications are known to increase metabolic stability and binding affinity to RNA, and replacing RNA nucleotides with DNA generates gRNAs with highly efficient gene-editing activity compared to the natural crRNA (Rahdar et al, 2015, PNA; McMahon et al. 2017, Molecular Therapy Vol. 26 No 5).

TABLE 12

| SEQ | Name | | | | Name |
|---|---|---|---|---|---|
| ID | (FIG. | | | Full modified guide | (FIG.2 |
| NO. | 27A) | Modification | Position | (repeat and spacer) | 7A, B) |
| 1442 | R2466_ | 2′-O-Methyl | 2′OMe at 3 first | mC*mU*mU*UCAAGACUA | Synthego_ |
| | Mo1 | (2′OMe), 3′ | (5′) and last (3′) | AUAGAUUGCUCCUUACG | Mod |
| | | phosphoro- | bases, 3′ PS | AGGAGACAGGAAUACAU | |
| | | thioate (PS) | bonds between | GGUACACmG*mU*mU* | |
| | | bonds | first 3 (5′) and | | |
| | | | last 2 (3′) bases | | |
| 1443 | R2466_ | 2′OMe, 3′, | 2′OMe at 3 first | mA*mA*mU*AGAUUGCUC | |
| | Mo2 | 25 nucleotide | (5′) and last (3′) | CUUACGAGGAGACAGGA | |
| | | repeat | bases, 3′ PS | AUACAUGGUACACmG*m | |
| | | | bonds between | U*mU | |
| | | | first 3 (5′) and | | |
| | | | last 2 (3′) bases | | |
| 1444 | R2466_ | 2′-O- | 2′-O-Methoxy- | /52MOErA*/i2MOErA/UA | |
| | Mo3 | methoxy- | ethyl bases at 2 | GAUUGCUCCUUACGAGG | |
| | | ethyl bases | first (5′) and last | AGACAGGAAUACAUGGU | |
| | | | (3′) bases, 3′ PS | ACACG/i2MOErT/32MOErT | |
| | | | bonds between | | |
| | | | first 2 (5′) and | | |
| | | | last 2 (3′) bases | | |
| 1445 | R2466_ | 2′-Fluoro | First (5′) and last | /52FC/UUUCAAGACUAAU | |
| | Mo4 | (2′-F) | (3′) base | AGAUUGCUCCUUACGAG | |
| | | | | GAGACAGGAAUACAUGG | |
| | | | | UACACGU/32FU/ | |
| 1446 | R2466_ | 2′-F, 25 | First (5′) and last | /52FA/AUAGAUUGCUCCU | 1F, 45F |
| | Mo5 | nucleotide | (3′) base | UACGAGGAGACAGGAAU | (25 nt |
| | | repeat | | ACAUGGUACACGU/32FU/ | R) |
| 1447 | R2466_ | 2′-F, PS, | First (5′) base | mC*U*UUCAAGACUAAUA | 1, 2 |
| | Mo6 | 2′OMe | 2′OMe, PS | GAUUGCUCCUUACGAGG | OMe- |
| | | | between first | AGACAGGAAUACAUGGU | PS, 54, |
| | | | two (5′) bases, last | ACA/i2FC/i2FG/i2FU/ | 55, 56′F |
| | | | 4 (3′) bases 2′-F | 32FU/ | |
| 1448 | R2466_ | 2′-F, PS, | First (5′) base | mA*A*UAGAUUGCUCCUU | 1, 2 |
| | Mo7 | 2′OMe, 25 | 2′OMe, PS | ACGAGGAGACAGGAAUA | OMe- |
| | | nucleotide | between first | CAUGGUACA/i2FC/i2FG/ | PS, 54, |
| | | repeat | two (5′) bases, last | i2FU/32FU | 55, 56′F |
| | | | 4 (3′)bases 2′-F | | (25nt |
| | | | | | R) |
| 1449 | R2466_ | 2′-F | Last 4 (3′) bases | CUUUCAAGACUAAUAGA | 54, 55, |
| | Mo8 | | 2′-F | UUGCUCCUUACGAGGAG | 56 2′F |
| | | | | ACAGGAAUACAUGGUAC | |
| | | | | A/i2FC/i2FG/i2FU/32FU | |
| 1450 | R2466_ | 2′-F, 25 | Last 4 (3′) bases | AAUAGAUUGCUCCUUAC | 54, 55, |
| | Mo9 | nucleotide | 2′-F | GAGGAGACAGGAAUACA | 56 2′F |
| | | repeat | | UGGUACA/i2FC/i2FG/i2FU/ | (25 nt |
| | | | | 32FU | R) |
| 1451 | R2466_ | C3 Spacer, | First (5′) and last | CUUUCAAGACUAAUAGA | |
| | Mo10 | 21 nucleotide | (3′) base | UUGCUCCUUACGAGGAG | |
| | | spacer | | ACAGGAAUACAUGGUAC | |
| | | | | ACGUUG | |
| 1452 | R2466_ | C3 Spacer, | First (5′) and last | AAUAGAUUGCUCCUUAC | |
| | Mo11 | 21 nucleotide | (3′) base | GAGGAGACAGGAAUACA | |
| | | spacer, 25 | | UGGUACACGUUG | |
| | | nucleotide | | | |
| | | spacer | | | |
| 1453 | R2466_ | DNA bases + | 2′OMe at 3 | mC*mU*mU*UCAAGACUA | 1, 2, 3 |
| | Mo12 | 2′OMe, PS | first (5′) bases, | AUAGAUUGCUCCUUACG | Ome- |
| | | | last 4 (3′) bases | AGGAGACAGGAAUACAU | PS 54, |
| | | | DNA | GGUACACGTT | 55, 56 |
| | | | | | DNA |
| 1454 | R2466_ | DNA | Last (3′) 4 | CUUUCAAGACUAAUAGA | |
| | Mo13 | nucleoside | nucleoside | UUGCUCCUUACGAGGAG | |
| | | | | ACAGGAAUACAUGGUAC | |
| | | | | ACGTT | |
| 1455 | R2466_ | DNA | Nucleoside 1 of | CUUUCAAGACUAAUAGA | 1, 54, |
| | Mo14 | nucleosides | spacer and last | UUGCUCCUUACGAGGAG | 55, 56 |
| | | | (3′) 4 nucleosides | ACAGGAAUACAUGGUAC | DNA |
| | | | | ACGTT | |
| 1456 | R2466_ | DNA | Nucleoside 8 of | CUUUCAAGACUAAUAGA | |
| | Mo15 | nucleosides | spacer and last | UUGCUCCUUACGAGGAG | |
| | | | (3′) 4 nucleosides | ACAGGAAUACAUGGUAC | |
| | | | | ACGTT | |
| 1457 | R2466_ | DNA | Nucleoside 9 of | CUUUCAAGACUAAUAGA | |
| | Mo16 | nucleosides | spacer and last | UUGCUCCUUACGAGGAG | |
| | | | (3′) 4 nucleosides | ACAGGAAUACAUGGUAC | |
| | | | | ACGTT | |
| 1458 | R2466_ | DNA | Nucleoside 1 and | CUUUCAAGACUAAUAGA | 1, 8, 54, |
| | Mo17 | nucleosides | 8 of spacer and | UUGCUCCUUACGAGGAG | 55, 56 |
| | | | last (3′) 4 | ACAGGAAUACAUGGUAC | DNA |
| | | | nucleosides | ACGTT | |
| 1459 | R2466_ | DNA | Nucleoside 1 and | CUUUCAAGACUAAUAGA | |
| | Mo18 | nucleosides | 9 of spacer and | UUGCUCCUUACGAGGAG | |
| | | | last (3′) 4 | ACAGGAAUACAUGGUAC | |
| | | | nucleosides | ACGTT | |
| 1460 | R2466_ | DNA | Nucleoside 1, 8 | CUUUCAAGACUAAUAGA | 1, 8, 9, |
| | Mo19 | nucleosides | and 9 of spacer | UUGCUCCUUACGAGGAG | 54, 55, |
| | | | and last (3′) 4 | ACAGGAAUACAUGGUAC | 56 |
| | | | nucleosides | ACGTT | DNA |
| 1461 | R2466_ | DNA bases, | Nucleoside 1, 8 | AAUAGAUUGCUCCUUAC | |
| | Mo20 | 25 nucleotide | and 9 of spacer | GAGGAGACAGGAAUACA | |
| | | repeat | and last (3′) 4 | UGGUACACGTT | |
| | | | nucleosides | | |
| 1462 | R2466_ | Poly-A-tail, | | AAUAGAUUGCUCCUUAC | |
| | Mo21 | 25 nucleotide | | GAGGAGACAGGAAUACA | |
| | | repeat | | UGGUACACGUUAAAAAA | |
| | | | | A | |
| 1463 | R2466_ | DNA bases, | 2′OMe and PS at | mC*mU*mU*UCAAGACUA | 1, 2, 3 |
| | Mo22 | 2′OMe, PS | first 3 (5′) bases, | AUAGAUUGCUCCUUACG | OMe, |
| | | | DNA bases at 1, 8 | AGGAGACAGGAAUACAU | 1, 8, 9, |
| | | | and 9 of spacer, | GGUACACGTT | 54, 55, |
| | | | PS at last 4 (3′) | | 56 |
| | | | bases | | DNA |
| 1464 | R2466_ | Unmodified, | | AAUAGAUUGCUCCUUAC | |
| | Mo23 | 25 nucleotide | | GAGGAGACAGGAAUACA | |
| | | repeat | | UGGUACACGUU | |
| 1465 | R2466 | Unmodified | Unmodified | CUUUCAAGACUAAUAGA | |
| | (Un- | | | UUGCUCCUUACGAGGAG | |
| | modified) | | | ACAGGAAUACAUGGUAC | |
| | | | | ACGUU | |

### Example 33

### Optimization of Guide RNA Repeat and Spacer Length in CHO Cells

[0491] This example describes the optimization of repeat and spacer lengths of gRNAs for genome editing in CHO cells. In this study, RNP complexes were formed by incubating CasΦ.12 polypeptides (SEQ ID NO: 107) with a gRNA targeting Fut8 gene shown in TABLE 13. The gRNAs had different repeat lengths (20 to 36 nucleotides) or spacer lengths (15 to 30 nucleotides). Genomic DNA was extracted and the frequency of indel mutations was determined. For nucleofection, 250 pmol RNP was mixed with 200,000 cells per well. After 2 days, cells were collected and genomic DNA was extracted to determine the frequency of indel mutations. FIG. 28A shows the generation of indels by CasΦ.12 with gRNAs containing repeat sequences of different lengths. FIG. 28B the shows the generation of indels by CasΦ.12 with gRNAs containing spacer sequences of different lengths. The optimal gRNA for CasΦ.12-mediated genome editing in CHO cells was found to have a 20-nucleotide repeat length and a 17-nucleotide spacer length.

TABLE 13

| | | | Repeat | Spacer | |
|---|---|---|---|---|---|
| | Repeat | Spacer | sequence | sequence | crRNA sequence |
| Name | length | length | (5′ → 3′) | (5′ → 3′) | (5′ → 3′) |
| R3582 | 36 | 30 | CUUUCAAGA | AGGAAUACAU | CUUUCAAGACUAA |
| | | | CUAAUAGAU | GGUACACGUU | UAGAUUGCUCCUU |
| | | | UGCUCCUUA | GAAGAACAUU | ACGAGGAGACAGG |
| | | | CGAGGAGAC | (SEQ ID NO: | AAUACAUGGUACA |
| | | | (SEQ ID NO: | 1482) | CGUUGAAGAACAU |
| | | | 54) | | U (SEQ ID NO: 1499) |
| R3583 | 36 | 29 | CUUUCAAGA | AGGAAUACAU | CUUUCAAGACUAA |
| | | | CUAAUAGAU | GGUACACGUU | UAGAUUGCUCCUU |
| | | | UGCUCCUUA | GAAGAACAU | ACGAGGAGACAGG |
| | | | CGAGGAGAC | (SEQ ID NO: | AAUACAUGGUACA |
| | | | (SEQ ID NO: | 1483) | CGUUGAAGAACAU |
| | | | 54) | | (SEQ ID NO: 1500) |
| R3584 | 36 | 28 | CUUUCAAGA | AGGAAUACAU | CUUUCAAGACUAA |
| | | | CUAAUAGAU | GGUACACGUU | UAGAUUGCUCCUU |
| | | | UGCUCCUUA | GAAGAACA | ACGAGGAGACAGG |
| | | | CGAGGAGAC | (SEQ ID NO: | AAUACAUGGUACA |
| | | | (SEQ ID NO: | 1484) | CGUUGAAGAACA |
| | | | 54) | | (SEQ ID NO: 1501) |
| R3585 | 36 | 27 | CUUUCAAGA | AGGAAUACAU | CUUUCAAGACUAA |
| | | | CUAAUAGAU | GGUACACGUU | UAGAUUGCUCCUU |
| | | | UGCUCCUUA | GAAGAAC | ACGAGGAGACAGG |
| | | | CGAGGAGAC | (SEQ ID NO: | AAUACAUGGUACA |
| | | | (SEQ ID NO: | 1485) | CGUUGAAGAAC |
| | | | 54) | | (SEQ ID NO: 1502) |
| R3586 | 36 | 26 | CUUUCAAGA | AGGAAUACAU | CUUUCAAGACUAA |
| | | | CUAAUAGAU | GGUACACGUU | UAGAUUGCUCCUU |
| | | | UGCUCCUUA | GAAGAA (SEQ | ACGAGGAGACAGG |
| | | | CGAGGAGAC | ID NO: 1486) | AAUACAUGGUACA |
| | | | (SEQ ID NO: | | CGUUGAAGAA (SEQ |
| | | | 54) | | ID NO: 1503) |
| R3587 | 36 | 25 | CUUUCAAGA | AGGAAUACAU | CUUUCAAGACUAA |
| | | | CUAAUAGAU | GGUACACGUU | UAGAUUGCUCCUU |
| | | | UGCUCCUUA | GAAGA (SEQ | ACGAGGAGACAGG |
| | | | CGAGGAGAC | ID NO: 1487) | AAUACAUGGUACA |
| | | | (SEQ ID NO: | | CGUUGAAGA (SEQ |
| | | | 54) | | ID NO: 1504) |
| R3588 | 36 | 24 | CUUUCAAGA | AGGAAUACAU | CUUUCAAGACUAA |
| | | | CUAAUAGAU | GGUACACGUU | UAGAUUGCUCCUU |
| | | | UGCUCCUUA | GAAG (SEQ ID | ACGAGGAGACAGG |
| | | | CGAGGAGAC | NO: 1488) | AAUACAUGGUACA |
| | | | (SEQ ID NO: | | CGUUGAAG (SEQ ID |
| | | | 54) | | NO: 1505) |
| R3589 | 36 | 23 | CUUUCAAGA | AGGAAUACAU | CUUUCAAGACUAA |
| | | | CUAAUAGAU | GGUACACGUU | UAGAUUGCUCCUU |
| | | | UGCUCCUUA | GAA (SEQ ID | ACGAGGAGACAGG |
| | | | CGAGGAGAC | NO: 1489) | AAUACAUGGUACA |
| | | | (SEQ ID NO: | | CGUUGAA (SEQ ID |
| | | | 54) | | NO: 1506) |
| R3590 | 36 | 22 | CUUUCAAGA | AGGAAUACAU | CUUUCAAGACUAA |
| | | | CUAAUAGAU | GGUACACGUU | UAGAUUGCUCCUU |
| | | | UGCUCCUUA | GA (SEQ ID | ACGAGGAGACAGG |
| | | | CGAGGAGAC | NO: 1490) | AAUACAUGGUACA |
| | | | (SEQ ID NO: | | CGUUGA (SEQ ID |
| | | | 54) | | NO: 1507) |
| R3591 | 36 | 21 | CUUUCAAGA | AGGAAUACAU | CUUUCAAGACUAA |
| | | | CUAAUAGAU | GGUACACGUU | UAGAUUGCUCCUU |
| | | | UGCUCCUUA | G (SEQ ID NO: | ACGAGGAGACAGG |
| | | | CGAGGAGAC | 1491) | AAUACAUGGUACA |
| | | | (SEQ ID NO: | | CGUUG (SEQ ID |
| | | | 54) | | NO: 1508) |
| R3592 | 36 | 20 | CUUUCAAGA | AGGAAUACAU | CUUUCAAGACUAA |
| | | | CUAAUAGAU | GGUACACGUU | UAGAUUGCUCCUU |
| | | | UGCUCCUUA | (SEQ ID NO: | ACGAGGAGACAGG |
| | | | CGAGGAGAC | 1492) | AAUACAUGGUACA |
| | | | (SEQ ID NO: | | CGUU (SEQ ID |
| | | | 54) | | NO: 1509) |
| R3593 | 36 | 19 | CUUUCAAGA | AGGAAUACAU | CUUUCAAGACUAA |
| | | | CUAAUAGAU | GGUACACGU | UAGAUUGCUCCUU |
| | | | UGCUCCUUA | (SEQ ID NO: | ACGAGGAGACAGG |
| | | | CGAGGAGAC | 1493) | AAUACAUGGUACA |
| | | | (SEQ ID NO: | | CGU (SEQ ID |
| | | | 54) | | NO:1510) |
| R3594 | 36 | 18 | CUUUCAAGA | AGGAAUACAU | CUUUCAAGACUAA |
| | | | CUAAUAGAU | GGUACACG | UAGAUUGCUCCUU |
| | | | UGCUCCUUA | (SEQ ID NO: | ACGAGGAGACAGG |
| | | | CGAGGAGAC | 1494) | AAUACAUGGUACA |
| | | | (SEQ ID NO: | | CG (SEQ ID NO: 1511) |
| | | | 54) | | |
| R3595 | 36 | 17 | CUUUCAAGA | AGGAAUACAU | CUUUCAAGACUAA |
| | | | CUAAUAGAU | GGUACAC | UAGAUUGCUCCUU |
| | | | UGCUCCUUA | (SEQ ID NO: | ACGAGGAGACAGG |
| | | | CGAGGAGAC | 1495) | AAUACAUGGUACA |
| | | | (SEQ ID NO: | | C (SEQ ID NO: 1512) |
| | | | 54) | | |
| R3596 | 36 | 16 | CUUUCAAGA | AGGAAUACAU | CUUUCAAGACUAA |
| | | | CUAAUAGAU | GGUACA (SEQ | UAGAUUGCUCCUU |
| | | | UGCUCCUUA | ID NO: 1496) | ACGAGGAGACAGG |
| | | | CGAGGAGAC | | AAUACAUGGUACA |
| | | | (SEQ ID NO: | | (SEQ ID NO: 1513) |
| | | | 54) | | |
| R3597 | 36 | 15 | CUUUCAAGA | AGGAAUACAU | CUUUCAAGACUAA |
| | | | CUAAUAGAU | GGUAC (SEQ ID | UAGAUUGCUCCUU |
| | | | UGCUCCUUA | NO: 1497) | ACGAGGAGACAGG |
| | | | CGAGGAGAC | | AAUACAUGGUAC |
| | | | (SEQ ID NO: | | (SEQ ID NO: 1514) |
| | | | 54) | | |
| R3598 | 35 | 20 | UUUCAAGAC | AGGAAUACAU | UUUCAAGACUAAU |
| | | | UAAUAGAUU | GGUACACGUU | AGAUUGCUCCUUA |
| | | | GCUCCUUAC | (SEQ ID NO: | CGAGGAGACAGGA |
| | | | GAGGAGAC | 1498) | AUACAUGGUACAC |
| | | | (SEQ ID NO: | | GUU (SEQ ID |
| | | | 1466) | | NO: 1515) |
| R3599 | 34 | 20 | UUCAAGACU | AGGAAUACAU | UUCAAGACUAAUA |
| | | | AAUAGAUUG | GGUACACGUU | GAUUGCUCCUUAC |
| | | | CUCCUUACG | (SEQ ID NO: | GAGGAGACAGGAA |
| | | | AGGAGAC | 1498) | UACAUGGUACACG |
| | | | (SEQ ID NO: | | UU (SEQ ID NO: 1516) |
| | | | 1467) | | |
| R3600 | 33 | 20 | UCAAGACUA | AGGAAUACAU | UCAAGACUAAUAG |
| | | | AUAGAUUGC | GGUACACGUU | AUUGCUCCUUACG |
| | | | UCCUUACGA | (SEQ ID NO: | AGGAGACAGGAAU |
| | | | GGAGAC (SEQ | 1498) | ACAUGGUACACGU |
| | | | ID NO: 1468) | | U (SEQ ID NO: 1517) |
| R3601 | 32 | 20 | CAAGACUAA | AGGAAUACAU | CAAGACUAAUAGA |
| | | | UAGAUUGCU | GGUACACGUU | UUGCUCCUUACGA |
| | | | CCUUACGAG | (SEQ ID NO: | GGAGACAGGAAUA |
| | | | GAGAC (SEQ | 1498) | CAUGGUACACGUU |
| | | | ID NO: 1469) | | (SEQ ID NO: 1518) |
| R3602 | 31 | 20 | AAGACUAAU | AGGAAUACAU | AAGACUAAUAGAU |
| | | | AGAUUGCUC | GGUACACGUU | UGCUCCUUACGAG |
| | | | CUUACGAGG | (SEQ ID NO: | GAGACAGGAAUAC |
| | | | AGAC (SEQ ID | 1498) | AUGGUACACGUU |
| | | | NO: 1470) | | (SEQ ID NO: 1519) |
| R3603 | 30 | 20 | AGACUAAUA | AGGAAUACAU | AGACUAAUAGAUU |
| | | | GAUUGCUCC | GGUACACGUU | GCUCCUUACGAGG |
| | | | UUACGAGGA | (SEQ ID NO: | AGACAGGAAUACA |
| | | | GAC (SEQ ID | 1498) | UGGUACACGUU |
| | | | NO: 1471) | | (SEQ ID NO: 1520) |
| R3604 | 29 | 20 | GACUAAUAG | AGGAAUACAU | GACUAAUAGAUUG |
| | | | AUUGCUCCU | GGUACACGUU | CUCCUUACGAGGA |
| | | | UACGAGGAG | (SEQ ID NO: | GACAGGAAUACAU |
| | | | AC (SEQ ID | 1498) | GGUACACGUU (SEQ |
| | | | NO: 1472) | | ID NO: 1521) |
| R3605 | 28 | 20 | ACUAAUAGA | AGGAAUACAU | ACUAAUAGAUUGC |
| | | | UUGCUCCUU | GGUACACGUU | UCCUUACGAGGAG |
| | | | ACGAGGAGA | (SEQ ID NO: | ACAGGAAUACAUG |
| | | | C (SEQ ID NO: | 1498) | GUACACGUU (SEQ |
| | | | 1473) | | ID NO: 1522) |
| R3606 | 27 | 20 | CUAAUAGAU | AGGAAUACAU | CUAAUAGAUUGCU |
| | | | UGCUCCUUA | GGUACACGUU | CCUUACGAGGAGA |
| | | | CGAGGAGAC | (SEQ ID NO: | CAGGAAUACAUGG |
| | | | (SEQ ID NO: | 1498) | UACACGUU (SEQ ID |
| | | | 1474) | | NO: 1523) |
| R3607 | 26 | 20 | UAAUAGAUU | AGGAAUACAU | UAAUAGAUUGCUC |
| | | | GCUCCUUAC | GGUACACGUU | CUUACGAGGAGAC |
| | | | GAGGAGAC | (SEQ ID NO: | AGGAAUACAUGGU |
| | | | (SEQ ID NO: | 1498) | ACACGUU (SEQ ID |
| | | | 1475) | | NO: 1524) |
| R3608 | 25 | 20 | AAUAGAUUG | AGGAAUACAU | AAUAGAUUGCUCC |
| | | | CUCCUUACG | GGUACACGUU | UUACGAGGAGACA |
| | | | AGGAGAC | AGGAAUACAU | GGAAUACAUGGUA |
| | | | (SEQ ID NO: | GGUACACGUU | CACGUU (SEQ ID |
| | | | 1476) | (SEQ ID NO: | NO: 1525) |
| | | | | 2487) | |
| R3609 | 24 | 20 | AUAGAUUGC | AGGAAUACAU | AUAGAUUGCUCCU |
| | | | UCCUUACGA | GGUACACGUU | UACGAGGAGACAG |
| | | | GGAGAC (SEQ | AGGAAUACAU | GAAUACAUGGUAC |
| | | | ID NO: 1477) | GGUACACGUU | ACGUU (SEQ ID |
| | | | | (SEQ ID NO: | NO: 1526) |
| | | | | 2487) | |
| R3610 | 23 | 20 | UAGAUUGCU | AGGAAUACAU | UAGAUUGCUCCUU |
| | | | CCUUACGAG | GGUACACGUU | ACGAGGAGACAGG |
| | | | GAGAC (SEQ | AGGAAUACAU | AAUACAUGGUACA |
| | | | ID NO: 1478) | GGUACACGUU | CGUU (SEQ ID |
| | | | | (SEQ ID NO: | NO: 1527) |
| | | | | 2487) | |
| R3611 | 22 | 20 | AGAUUGCUC | AGGAAUACAU | AGAUUGCUCCUUA |
| | | | CUUACGAGG | GGUACACGUU | CGAGGAGACAGGA |
| | | | AGAC (SEQ ID | AGGAAUACAU | AUACAUGGUACAC |
| | | | NO: 1479) | GGUACACGUU | GUU (SEQ ID |
| | | | | (SEQ ID NO: | NO: 1528) |
| | | | | 2487) | |
| R3612 | 21 | 20 | GAUUGCUCC | AGGAAUACAU | GAUUGCUCCUUAC |
| | | | UUACGAGGA | GGUACACGUU | GAGGAGACAGGAA |
| | | | GAC (SEQ ID | AGGAAUACAU | UACAUGGUACACG |
| | | | NO: 1480) | GGUACACGUU | UU (SEQ ID NO: 1529) |
| | | | | (SEQ ID NO: | |
| | | | | 2487) | |
| R3613 | 20 | 20 | AUUGCUCCU | AGGAAUACAU | AUUGCUCCUUACG |
| | | | UACGAGGAG | GGUACACGUU | AGGAGACAGGAAU |
| | | | AC (SEQ ID | AGGAAUACAU | ACAUGGUACACGU |
| | | | NO: 1481) | GGUACACGUU | U (SEQ ID NO: 1530) |
| | | | | (SEQ ID NO: | |
| | | | | 2487) | |

### Example 34

### Identification of Optimal Guide RNAs for CasΦ Polypeptide-Mediated Genome Editing in Primary Cells

[0492] The present example shows identification of the best performing gRNAs that target TRAC, B2M and programmed cell death protein 1 (PD1) in T cells. In this study, CasΦ.12 polypeptides (SEQ ID NO: 107) were incubated with different gRNAs (shown in Table 14) at room temperature for 10 minutes to form RNP complexes. T cells were resuspended at 5×10⁵ cells/20 μL in electroporation solution (Lonza) and an Amaxa 4D Nucleofector with pulse code EH115 was used to nucleofect the cells Immediately after nucleofection, 80 μl pre-warmed culture medium was added to each well. The cells were then left in the cuvette plate for 10 minutes before transfer to the culture plate. After 48 hours, DNA was extracted from half of the cells and PCR was performed to detect the frequency of indels. The rest of the cells were cultured until Day 5, and were then collected for flow cytometry to detect the frequency of TRAC or B2M knockout. FIG. 29A and FIG. 29B show exemplary gRNAs for targeting TRAC. FIG. 29B and FIG. 29C show exemplary gRNAs for targeting B2M. FIG. 29E shows exemplary gRNAs for targeting PD1. Additionally, this example demonstrates that a guide RNAs targeting a non-coding region can mediate gene knockout. For example, R3007, R2995, R2992 and R3014 target non-coding regions of the PD1 gene. The screening for gRNAs targeting TRAC is shown in FIG. 29F and for gRNAs targeting B2M is shown in FIG. 29H. Flow cytometry plots of exemplary gRNAs targeting TRAC are shown in FIG. 29G and of exemplary gRNAs targeting B2M in FIG. 29I.

TABLE 14

| Name | Target | Spacer sequence (5′ → 3′) |
|---|---|---|
| R3041 | TRAC | UCCCACAGAUAUCCAGAACC (SEQ ID NO: 2470) |
| R3042 | TRAC | GAGUCUCUCAGCUGGUACAC (SEQ ID NO: 1436) |
| R3043 | TRAC | AGAGUCUCUCAGCUGGUACA (SEQ ID NO: 2471) |
| R3061 | TRAC | AAGUCCAUAGACCUCAUGUC (SEQ ID NO: 2472) |
| R3063 | TRAC | AAGAGCAACAGUGCUGUGGC (SEQ ID NO: 2473) |
| R3066 | TRAC | GUUGCUCCAGGCCACAGCAC (SEQ ID NO: 2474) |
| R3068 | TRAC | GCACAUGCAAAGUCAGAUUU (SEQ ID NO: 2475) |
| R3069 | TRAC | GCAUGUGCAAACGCCUUCAA (SEQ ID NO: 2476) |
| R3081 | TRAC | CUAAAAGGAAAAACAGACAU (SEQ ID NO: 2477) |
| R3141 | TRAC | CUCGACCAGCUUGACAUCAC (SEQ ID NO: 2478) |
| R3088 | B2M | AUAUAAGUGGAGGCGUCGCG (SEQ ID NO: 2479) |
| R3091 | B2M | GGGCCGAGAUGUCUCGCUCC (SEQ ID NO: 1429) |
| R3094 | B2M | UGGCCUGGAGGCUAUCCAGC (SEQ ID NO: 2480) |
| R3119 | B2M | AAGUUGACUUACUGAAGAAU (SEQ ID NO: 2481) |
| R3132 | B2M | AGCAAGGACUGGUCUUUCUA (SEQ ID NO: 2482) |
| R3149 | B2M | AGUGGGGGUGAAUUCAGUGU (SEQ ID NO: 2483) |
| R3150 | B2M | CAGUGGGGGUGAAUUCAGUG (SEQ ID NO: 1434) |
| R3155 | B2M | GGCUGUGACAAAGUCACAUG (SEQ ID NO: 2484) |
| R3156 | B2M | GUCACAGCCCAAGAUAGUUA (SEQ ID NO: 2485) |
| R3157 | B2M | UCACAGCCCAAGAUAGUUAA (SEQ ID NO: 2486) |
| R2946 | PD1 | UGUGACACGGAAGCGGCAGU (SEQ ID NO: 263) |
| R2992 | PD1 | GGGGCUGGUUGGAGAUGGCC (SEQ ID NO: 309) |
| R2995 | PD1 | GAGCAGCCAAGGUGCCCCUG (SEQ ID NO: 312) |
| R3007 | PD1 | ACACAUGCCCAGGCAGCACC (SEQ ID NO: 324) |
| R3014 | PD1 | AGGCCCAGCCAGCACUCUGG (SEQ ID NO: 331) |

### Example 35

RNP and mRNA Delivery of CasΦ Polypeptides

[0493] This example illustrates that CasΦ.12 can be delivered to primary cells as mRNA or as an RNP complex. In one study, RNP complexes were formed using CasΦ.12 protein (0, 100, 200 or 400 pmol) (SEQ ID NO: 107) and gRNAs (0, 400 or 800 pmol) targeting B2M or TRAC. RNP complexes were added to T cells. T cells were nucleofected using the Amaxa P3 kit and Amaxa 4D 96-well electroporation system with pulse code EH115. Cells were harvested for flow cytometry to determine the percentage of B2M or TRAC knockout cells, and genomic DNA was extracted to detect the frequency of indel mutations. As shown in FIG. 30A, a distinct population of B2M-negative cells was detected in T cells transfected with CasΦ.12 RNP complex targeting B2M. A distinct population of TRAC-negative cells was detected in in T cells transfected with CasΦ.12 RNP complex targeting TRAC, and shown in FIG. 30B. Quantification of the percentage of B2M knockout cells is shown in FIG. 30C and quantification of the percentage of TRAC knockout cells is shown in FIG. 30D. A high frequency of indel mutations was also seen after delivery of RNP complexes. As shown in FIG. 30E, ˜55% indel mutations was detected when RNP complexes targeting B2M were formed using 400 pmol protein and 800 pmol guide RNA. A similar frequency of indel mutations was detected when RNP complexes targeting TRAC were formed using the same conditions, as illustrated in FIG. 30F.

[0494] In a second study, CasΦ.12 mRNA was delivered to T cells with a gRNA targeting the B2M gene. For nucleofection, T cells were resuspended in BTXpress electroporation medium (5×10⁵ cells per well) and mixed with CasΦ.12 mRNA and 500 pmol gRNA. Cells were collected on Day 2 for extraction of genomic DNA, and the frequency of indel mutations was determined. As shown in FIG. 30G, delivery of CasΦ.12 mRNA and gRNA resulted in a high frequency of indel mutations. This was at a comparable level to genome editing with delivery of Cas9 mRNA. Further data from this study are shown in FIG. 30I, FIG. 30J and FIG. 30K. FIG. 30I shows the frequency of indel mutations and functional knockout, as assessed by flow cytometry, of the B2M gene induced by either CasΦ.12 or Cas9 targeting the same site. FIG. 30J and FIG. 30K shows the distribution of the size of indel mutations induced by CasΦ.12 or Cas9 determined by NGS analysis. CasΦ.12 predominantly induced larger deletion mutations whereas Cas9 induced mostly small 1 bp InDels. This data further confirms the ability of CasΦ.12 to mediate genome editing at the B2M locus.

### Example 36

gRNA Processing by CasΦ Polypeptides in Mammalian Cells

[0495] This example illustrates the ability of CasΦ polypeptides to process gRNA in mammalian cells. In this study, HEK293T cells were transfected with crRNA and expression plasmids encoding CasΦ.12 (SEQ ID NO: 107) using lipofectamine on day 0. The crRNA had the repeat sequence (the region that binds to CasΦ.12) CTTTCAAGACTAATAGATTGCTCCTTACGAGGAGAC (SEQ ID NO: 54). To determine the nature of the crRNAs expressed in the HEK293T cells, the microRNA species in the HEK293T cells were analyzed by next generation sequencing. After 2 days, miRNA was extracted using the mirVANA kit. RNA was treated with recombinant Shrimp Alkaline Phosphatase (rSAP) to remove all the phosphates from the 5′ and 3′ ends of the RNA. PNK phosphorylation was then performed to add phosphate back to the 5′ ends in preparation for adaptor ligation to the RNA. RNA was then mixed with 3′ SR Adaptor for Illumina, followed by 3′ ligation enzyme mix and incubated for 1 hour at 25° C. in a thermal cycler. The reverse transcription primer was then hybridized to prevent adaptor-dimer formation. The SR RT primer hybridizes to the excess of 3′ SR Adaptor (that remains free after the 3′ ligation reaction) and transforms the single stranded DNA adaptor into a double-stranded DNA molecule. Double-stranded DNAs are not substrates for ligation mediated by T4 RNA Ligase 1 and therefore do not ligate to the 5 SR. The RNA-ligation mixture from the previous step was mixed with SR RT primer for Illumina and placed in a thermocycler for the following program: 5 minutes at 75° C., 15 minutes at 37° C., 15 minutes at 25° C., hold at 4° C. The RNA-ligation mixture was then incubated with 5′ SR adaptor for 1 hour at 25° C. in a thermal cycler. Finally, RNA was reverse transcribed using ProtoScript II Reverse Transcriptase and amplified for PCR. The sample was then analyzed by next generation sequencing.

[0496] As shown in FIG. 31A and FIG. 31B the major crRNA molecule detected by sequence analysis was 24 nucleotides long (ATAGATTGCTCCTTACGAGGAGAC (SEQ ID NO: 1531) which is 12 nucleotides shorter than the full length repeat sequence (CTTTCAAGACTAATAGATTGCTCCTTACGAGGAGAC (SEQ ID NO: 54)) that was delivered to the HEK293T cells. This demonstrates how CasΦ.12 can process the repeat region of its crRNA in mammalian cells.

### Example 37

### CasΦ Polypeptide Cleavage Generates 5′ Overhangs

[0497] This example illustrates different CasΦ polypeptide-induced cleavage patterns. In this study, CasΦ polypeptides (CasΦ.12, CasΦ.45, CasΦ.43, CasΦ.39. CasΦ.37, CasΦ.33, CasΦ.32, CasΦ.30, CasΦ.28, CasΦ.25, CasΦ.24, CasΦ.22, CasΦ.20, CasΦ.18) were complexed with a crRNA to form RNPs. The RNPs were then used in cleavage reactions with plasmid DNA comprising a target sequence and a PAM (GTTG). The cleavage reaction was carried out at 37° C. and had a duration of 15 minutes. The cleavage products were then analyzed by gel electrophoresis. As shown in FIG. 32A, the majority of CasΦ polypeptides generated a linear product from a plasmid target, whilst some CasΦ polypeptides introduced nicks into the plasmid DNA.

[0498] FIG. 32B shows a schematic of the cut sites on the target and non-target strand of a double-stranded target nucleic acid. The nature of the cleavage patterns resulting from the location of the cut sites on the target and non-target strands was investigated by sequence analysis, as shown in FIG. 32C and represented in FIG. 32D. These data show that the cleavage pattern following CasΦ polypeptide mediated cleavage of target nucleic acid is a staggered cut comprising 5′ overhangs. FIG. 32E shows a table of cut sites and overhangs of the different CasΦ polypeptides. The “#bp overlap” corresponds to the length of the 5′ overhang for each CasΦ polypeptide. For comparison, Cpf1 introduces a staggered double-stranded DNA break with a 4- or 5-nucleotide 5′ overhang (Zetsche et. al 2015 Cell).

### Example 38

Multiplex Genome Editing with CasΦ Polypeptides

[0499] This example illustrates the ability of CasΦ RNP complexes to knockout multiple genes simultaneously. In this study, gRNAs targeting B2M, TRAC and PDCD1 (provided in Table 15) were incubated with CasΦ.12 (SEQ ID NO: 12) for 10 minutes at room temperature to form B2M, TRAC, and PDCD1 targeting RNPs, respectively. The B2M targeting RNPs, TRAC targeting RNPs, PDCD1 targeting RNPs and combinations thereof were added to T cells. T cells were resuspended at 5×10⁵ cells/20 μL in Nucleofection P3 solution and an Amaxa 4D 96-well electroporation system with pulse code EH115 was used to nucleofect the cells. Immediately after nucleofection, 85 μl pre-warmed culture medium was added to each well. The cells were then left in the cuvette plate for 10 minutes before transfer to the culture plate. On Day 3, genomic DNA was extracted and sent for NGS sequencing and the % indel was measured with a positive % indel being indicative of % knockout. On Day 5, cells were harvested for flow cytometry and the % knockout was measured with fluorescently labeled antibodies to TRAC and B2M (antibody to PDCD1 unavailable). % indel results are presented in Table 16 and flow cytometry data presented in Table 17. Corresponding flow cytometry panels are shown in FIG. 33.

TABLE 15

| Description | SEQ ID | Sequence |
|---|---|---|
| B2M gRNA | 1532 | CUUUCAAGACUAAUAGAUUGCUCCUUACG |
| (R3132) | | AGGAGACAGCAAGGACUGGUCUUUCUA |
| TRAC gRNA | 1432 | CUUUCAAGACUAAUAGAUUGCUCCUUACG |
| (R3042) | | AGGAGACGAGUCUCUCAGCUGGUACAC |
| PDCD1 gRNA | 791 | CUUUCAAGACUAAUAGAUUGCUCCUUACG |
| (R2925) | | AGGAGACUAGCACCGCCCAGACGACUG |

TABLE 16

| Description | RNP Guide ID(s) | Amplicon | % INDEL |
|---|---|---|---|
| TRAC single KO | R3042 | TRAC | 77.6% |
| B2M single KO | R3132 | B2M | 85.5% |
| PDCD1 single KO | R2925 | PDCD1 | 44.6% |
| TRAC, B2M double KO | R3132 & R3042 | TRAC | 58.8% |
| TRAC, B2M double KO | R3132 & R3042 | B2M | 61.2% |
| TRAC, B2M, PDCD1 | R3132, R3042, | TRAC | 59.2% |
| triple KO | R2925 | | |
| TRAC, B2M, PDCD1 | R3132, R3042, | B2M | 69.4% |
| triple KO | R2925 | | |
| TRAC, B2M, PDCD1 | R3132, R3042, | PDCD1 | 42.1% |
| triple KO | R2925 | | |

TABLE 17

| | B2M+ | B2M+, | B2M−, | B2M−, |
|---|---|---|---|---|
| gRNA | CD3− | CD3+ | CD3+ | CD3− |
| TRAC | 94 | 5.91 | 0.00418 | 0.1 |
| B2M | 0.051 | 8.65 | 90.7 | 0.59 |
| TRAC + B2M | 4.2 | 4.89 | 4.01 | 86.9 |
| TRAC + B2M + | 4.74 | 14.1 | 4.33 | 76.8 |
| PDCD1 | | | | |

### Example 39

Genome Editing with CasΦ Polypeptides Mediates Efficient Editing of PCSK9 in Mouse Hepatoma Cells

[0500] The present example shows that CasΦ.12 RNP complexes are highly effective at mediating editing the PCSK9 gene. In this study, 95 CasΦ gRNAs targeting PCSK9 (sequences shown in Tables E and Q), were incubated with CasΦ.12 (SEQ ID NO: 12) to form RNP complexes. Positive control RNP complexes were also formed using Cas9 and a gRNA. Hepa1-6 mouse hepatoma cells (100,000 cells) were resuspended in SF solution (Lonza) and nucleofected with CasΦ RNPs (250 pmoles) or the control Cas9 RNPs (60 pmoles) using program CM-137 or CM-148 (Amaxa nucleofector). Cells were collected after 48 hours, genomic DNA was extracted and the frequency of indel mutations was determined using NGS. FIG. 34 shows that CasΦ.12 is a highly effective genome editing tool, with an indel frequency of up to 48% induced by CasΦ.12 RNP complexes. Whereas, the maximum indel frequency induced by Cas9 was only about 22%.

### Example 40

### Adeno-Associated Virus Encoding CasΦ.12 Facilitates Genome Editing

[0501] This example shows that a CasΦ.12 plasmid, including both CasΦ polypeptide sequence and gRNA sequence, sometimes called an all-in-one, can be used to facilitate genome editing. In this study, the crRNAs (sequences shown in Tables E and Q) from the initial RNP screen were chosen and truncations of these crRNAs were generated with repeat lengths of 36, 25, 20, or 19 nucleotides in combination with spacer lengths of 20, 17, or 16 nucleotides. Each crRNA was then cloned into an AAV vector consisting of U6 promoter to drive crRNA expression, intron-less EF1alpha short (EFS) promoter driving CasΦ expression, PolyA signal, and 1 kb stuffer sequence genomic. Hepa1-6 mouse hepatoma cells were nucleofected with 10 μg of each AAV plasmid. After 72 hours, genomic DNA was extracted and the frequency of indel mutations was determined using NGS. FIG. 35A shows a plasmid map of the adeno-associated virus (AAV) encoding the CasΦ polypeptide sequence and gRNA sequence. FIG. 35D shows the frequency of CasΦ.12 induced indel mutations in Hepa1-6 cells transduced with 10 μg of each AAV plasmid. gRNAs containing repeat sequences of 19, 20, 25 or 36 nucleotides and spacer sequences of 16, 17 or 20 nucleotides were used in this study. In the graph legend, repeat and spacer lengths are indicated as the number of nucleotides in the repeat followed by the number of nucleotides in the spacer, eg 20-17 has a repeat length of 20 nucleotides and a spacer length of 17 nucleotides. The frequency of indel mutations is comparable to that of Cas9. FIG. 35E and FIG. 35F show the frequency of CasΦ.12 induced indel mutations with different gRNA containing repeat and spacer sequences of different lengths (indicated as in FIG. 35F with repeat length followed by spacer length). This study demonstrates that the all-in-one vector method of CasΦ.12 mediated genome editing is robust across different gRNA sequences and with gRNAs of different repeat and spacer lengths.

[0502] AAV vectors are a leading platform for delivery of gene therapy for treatment of human disease (Wang et al., (2019) Nature Reviews Drug Discovery). One of the limitations of viral vector delivery of CRISPR/Cas9 is the size of Cas9. AAVs are roughly 20 nm, allowing for 4.5 kb genomic material to be packaged within it. This makes packaging Cas9 and a gRNA (˜4.2 kB) with any additional elements such as multiple gRNAs or a donor polynucleotide for HDR challenging (Lino et al., (2018), Drug Delivery). Whereas CasΦ is much smaller, allowing all of the components of the CRISPR system to be packaged in one viral vector.

### Example 41

### Optimization of Lipid Nanoparticle Delivery of CasΦ

[0503] This example describes the optimization of lipid nanoparticle (LNP) delivery of CasΦ mRNA and gRNA. In this study, the encapsulation efficiency of LNPs was optimized by testing different amine group to phosphate group ratio (N/P) of LNPs containing CasΦ mRNA and gRNA. An LNP kit from Precision Nanosystems (Gen Voy-ILM™) was used to generate LNPs with different N/P ratios. LNPs were then dropped into HEK293T cells. Genomic DNA was extracted and the frequency of indel mutations was determined using NGS. The gRNA used in this study was R2470 with 2′ O-methyl on the first three 5′ and last three 3′ nucleotides and phosphorothioate bonds in between the first three 5′ nucleotides and in between the last two 3′ nucleotides. The sequence of R2470 from 5′ to 3′ is 42256-779_601_SL. The mRNA was generated using T7 messenger mRNA IVT kit. As shown in FIG. 36, indel mutations were detected following the use of a range of N/P ratios.

[0504] LNPs are one of the most clinically advanced non-viral delivery systems for gene therapy. LNPs have many properties that make them ideal candidates for delivery of nucleic acids, including ease of manufacture, low cytotoxicity and immunogenicity, high efficiency of nucleic acid encapsulation and cell transfection, multidosing capabilities and flexibility of design (Kulkarni et al., (2018) Nucleic Acid Therapeutics).

### Example 42

Genome Editing in Hematopoietic Stem Cells with CasΦ Polypeptides

[0505] This example demonstrates CasΦ-mediated genome editing of CD34 hematopoietic stem cells (HSCs). HSCs are stem cells that differentiate to give rise blood cells, such as T and B lymphocytes, erythrocytes, monocytes and macrophages. HSCs are important cells for future stem cell therapies as they have the potential to be used to treat genetic blood cell diseases (Morgan et al. (2017), Cell Stem Cell).

[0506] In this study human CD34 cells were grown in XVIVO10 media (+5% FBS, +1×CC110) for three days. On the third day, the cells were nucleofected using the Lonza P3 kit with either RNP containing CasΦ.12 polypeptides complexed with B2M-targeting guide R3132 (42256-779_601_SL), or a mixture of CasΦ.12 mRNA with B2M-targeting guide. Cells were collected after 3 days, genomic DNA was purified and the frequency of indel mutations at the B2M locus was analyzed by NGS. As shown in FIG. 37, CasΦ.12 is an effective tool for genome editing when CasΦ.12 is delivered to cells as CasΦ.12 RNP complexes or CasΦ.12 mRNA.

[0507] This example illustrates the utility of CasΦ polypeptides as genome editing tools in stem cells, such as HSCs.

### Example 43

Genome Editing in Induced Pluripotent Stem Cells with CasΦ Polypeptides

[0508] This example demonstrates CasΦ-mediated genome editing of induced pluripotent stem cells (iPSCs). iPSCs are pluripotent stem cells that are generated from somatic cells. They can propagate indefinitely and give rise to any cell type in the body. These features make iPSCs a powerful tool for researching human disease and provide a promising prospect for cell therapies for a range of medical conditions. iPSCs can be generated in a patient-specific manner and used in autologous transplant, thereby overcoming complications of rejection by the host immune system (Moradi et al. (2019), Stem Cell Research & Therapy).

[0509] In this study, high quality WTC-11 iPSCs were harvested as single cells using Accutase treatment for 5 minutes. RNP complexes were formed using CasΦ.12 polypeptides and gRNAs targeting either the B2M locus or targeting a CIITA locus (sequences shown in Table 19). RNP complexes were formed using 2:1 gRNA: CasΦ.12 RNP (1000 pmol gRNA+500 pmol Cas12Φ.12) and incubating at room temperature for approximately 15 minutes. WTC-11 iPSCs (200,000 cells) were resuspended in 20 uL of P3 nucleofection solution per reaction and 40 uL of cell suspension was added to each RNP tube. Half of the volume of each RNP/cell suspension mixture was added to the Lonza 96 well shuttle and nucleofection was performed using the program CD118. To recover the transfected cells, 80 μL of warm StemFlex media supplemented with 2 μM of Thiazovivin was added to the wells of the shuttle. The entire volume of the shuttle well was transferred to a 96 well plate previously coated with 0.337 mg/mL Matrigel containing 100 μL of 2 μM of Thiazovivin. Cells were allowed to recover for 24 hours in 37° C. incubator with humidity control. Cells were confluent 48 hours post-transfection, and single-cell passaged using Accutase. Genomic DNA was extracted using KingFisher Tissue and DNA kit. NGS library preparation was performed using in house protocols and the frequency of indel mutations was quantified using Crispresso. As shown in FIG. 38, effective genome editing at the B2M and CIITA loci was achieved with CasΦ.12 RNP complexes in iPSCs.

[0510] This example demonstrates the utility of CasΦ as genome editing tools in iPSCs.

TABLE 19

| | | | SEQ |
|---|---|---|---|
| | | | ID |
| Name | Target | Sequence | NO |
| R3132 | B2M | AUUGCUCCUUACGAGGAGACAGCAAGGACU | 2488 |
| | | GGUCUUU | |
| R4504_CasPhi12_S | CIITA | AUUGCUCCUUACGAGGAGACGGGCUCUGAC | 1722 |
| | | AGGUAGG | |
| R5406_CasPhi12 | CIITA | CUUUCAAGACUAAUAGAUUGCUCCUUACGA | 2222 |
| | | GGAGACGGGUCAAUGCUAGGUACUGC | |

### Example 44

Genome Editing with CasΦ Polypeptides Mediates Efficient Editing of CIITA Locus

[0511] This example demonstrates CasΦ-mediated genome editing of the CIITA locus. In this study, RNP complexes were formed using CasΦ polypeptides and gRNAs targeting CIITA (sequences shown in Tables D and O). K562 cells were nucleofected with RNP complexes (250 pmol) using Lonza nucleofection protocols. Cells were harvested after 48 hours, genomic DNA was isolated and the frequency of indel mutations was evaluated using NGS analysis (MiSeq, Illumina). As shown in FIG. 39, effective genome editing of the CIITA locus was achieved using CasΦ RNP complexes.

[0512] While preferred embodiments of the present invention have been shown and described herein, it will be apparent to those skilled in the art that such embodiments are provided by way of example only. Numerous variations, changes, and substitutions will now occur to those skilled in the art without departing from the invention. It should be understood that various alternatives to the embodiments of the invention described herein may be employed in practicing the invention. It is intended that the following claims define the scope of the invention and that methods and structures within the scope of these claims and their equivalents be covered thereby.

The application's sequence listing, which the Patent Office published only in electronic form, follows.

SEQUENCE LISTING (2838 sequences)

SEQ ID NO: 1 - protein, 707 aa, synthetic construct
MADTPTLFTQFLRHHLPGQRFRKDILKQAGRILANKGEDATIAFLRGKSEESPPDFQPPVKCPIIACSRPLTEWPIYQASVAIQGYVYGQSLAEFEASDPGCSKDGLLGWFDKTGVCTDYFSVQGLNLIFQNARKRYIGVQTKVTNRNEKRHKKLKRINAKRIAEGLPELTSDEPESALDETGHLIDPPGLNTNIYCYQQVSPKPLALSEVNQLPTAYAGYSTSGDDPIQPMVTKDRLSISKGQPGYIPEHQRALLSQKKHRRMRGYGLKARALLVIVRIQDDWAVIDLRSLLRNAYWRRIVQTKEPSTITKLLKLVTGDPVLDATRMVATFTYKPGIVQVRSAKCLKNKQGSKLFSERYLNETVSVTSIDLGSNNLVAVATYRLVNGNTPELLQRFTLPSHLVKDFERYKQAHDTLEDSIQKTAVASLPQGQQTEIRMWSMYGFREAQERVCQELGLADGSIPWNVMTATSTILTDLFLARGGDPKKCMFTSEPKKKKNSKQVLYKIRDRAWAKMYRTLLSKETREAWNKALWGLKRGSPDYARLSKRKEELARRCVNYTISTAEKRAQCGRTIVALEDLNIGFFHGRGKQEPGWVGLFTRKKENRWLMQALHKAFLELAHHRGYHVIEVNPAYTSQTCPVCRHCDPDNRDQHNREAFHCIGCGFRGNADLDVATHNIAMVAITGESLKRARGSVASKTPQPLAAE

SEQ ID NO: 2 - protein, 757 aa, synthetic construct
MPKPAVESEFSKVLKKHFPGERFRSSYMKRGGKILAAQGEEAVVAYLQGKSEEEPPNFQPPAKCHVVTKSRDFAEWPIMKASEAIQRYIYALSTTERAACKPGKSSESHAAWFAATGVSNHGYSHVQGLNLIFDHTLGRYDGVLKKVQLRNEKARARLESINASRADEGLPEIKAEEEEVATNETGHLLQPPGINPSFYVYQTISPQAYRPRDEIVLPPEYAGYVRDPNAPIPLGVVRNRCDIQKGCPGYIPEWQREAGTAISPKTGKAVTVPGLSPKKNKRMRRYWRSEKEKAQDALLVTVRIGTDWVVIDVRGLLRNARWRTIAPKDISLNALLDLFTGDPVIDVRRNIVTFTYTLDACGTYARKWTLKGKQTKATLDKLTATQTVALVAIDLGQTNPISAGISRVTQENGALQCEPLDRFTLPDDLLKDISAYRIAWDRNEEELRARSVEALPEAQQAEVRALDGVSKETARTQLCADFGLDPKRLPWDKMSSNTTFISEALLSNSVSRDQVFFTPAPKKGAKKKAPVEVMRKDRTWARAYKPRLSVEAQKLKNEALWALKRTSPEYLKLSRRKEELCRRSINYVIEKTRRRTQCQIVIPVIEDLNVRFFHGSGKRLPGWDNFFTAKKENRWFIQGLHKAFSDLRTHRSFYVFEVRPERTSITCPKCGHCEVGNRDGEAFQCLSCGKTCNADLDVATHNLTQVALTGKTMPKREEPRDAQGTAPARKTKKASKSKAPPAEREDQTPAQEPSQTS

SEQ ID NO: 3 - protein, 765 aa, synthetic construct
MYILEMADLKSEPSLLAKLLRDRFPGKYWLPKYWKLAEKKRLTGGEEAACEYMADKQLDSPPPNFRPPARCVILAKSRPFEDWPVHRVASKAQSFVIGLSEQGFAALRAAPPSTADARRDWLRSHGASEDDLMALEAQLLETIMGNAISLHGGVLKKIDNANVKAAKRLSGRNEARLNKGLQELPPEQEGSAYGADGLLVNPPGLNLNIYCRKSCCPKPVKNTARFVGHYPGYLRDSDSILISGTMDRLTIIEGMPGHIPAWQREQGLVKPGGRRRRLSGSESNMRQKVDPSTGPRRSTRSGTVNRSNQRTGRNGDPLLVEIRMKEDWVLLDARGLLRNLRWRESKRGLSCDHEDLSLSGLLALFSGDPVIDPVRNEVVFLYGEGIIPVRSTKPVGTRQSKKLLERQASMGPLTLISCDLGQTNLIAGRASAISLTHGSLGVRSSVRIELDPEIIKSFERLRKDADRLETEILTAAKETLSDEQRGEVNSHEKDSPQTAKASLCRELGLHPPSLPWGQMGPSTTFIADMLISHGRDDDAFLSHGEFPTLEKRKKFDKRFCLESRPLLSSETRKALNESLWEVKRTSSEYARLSQRKKEMARRAVNFVVEISRRKTGLSNVIVNIEDLNVRIFHGGGKQAPGWDGFFRPKSENRWFIQAIHKAFSDLAAHHGIPVIESDPQRTSMTCPECGHCDSKNRNGVRFLCKGCGASMDADFDAACRNLERVALTGKPMPKPSTSCERLLSATTGKVCSDHSLSHDAIEKAS

SEQ ID NO: 4 - protein, 766 aa, synthetic construct
MEKEITELTKIRREFPNKKFSSTDMKKAGKLLKAEGPDAVRDFLNSCQEIIGDFKPPVKTNIVSISRPFEEWPVSMVGRAIQEYYFSLTKEELESVHPGTSSEDHKSFFNITGLSNYNYTSVQGLNLIFKNAKAIYDGTLVKANNKNKKLEKKFNEINHKRSLEGLPIITPDFEEPFDENGHLNNPPGINRNIYGYQGCAAKVFVPSKHKMVSLPKEYEGYNRDPNLSLAGFRNRLEIPEGEPGHVPWFQRMDIPEGQIGHVNKIQRFNFVHGKNSGKVKFSDKTGRVKRYHHSKYKDATKPYKFLEESKKVSALDSILAIITIGDDWVVFDIRGLYRNVFYRELAQKGLTAVQLLDLFTGDPVIDPKKGVVTFSYKEGVVPVFSQKIVPRFKSRDTLEKLTSQGPVALLSVDLGQNEPVAARVCSLKNINDKITLDNSCRISFLDDYKKQIKDYRDSLDELEIKIRLEAINSLETNQQVEIRDLDVFSADRAKANTVDMFDIDPNLISWDSMSDARVSTQISDLYLKNGGDESRVYFEINNKRIKRSDYNISQLVRPKLSDSTRKNLNDSIWKLKRTSEEYLKLSKRKLELSRAVVNYTIRQSKLLSGINDIVIILEDLDVKKKFNGRGIRDIGWDNFFSSRKENRWFIPAFHKAFSELSSNRGLCVIEVNPAWTSATCPDCGFCSKENRDGINFTCRKCGVSYHADIDVATLNIARVAVLGKPMSGPADRERLGDTKKPRVARSRKTMKRKDISNSTVEAMVTA

SEQ ID NO: 5 - protein, 812 aa, synthetic construct
MDMLDTETNYATETPAQQQDYSPKPPKKAQRAPKGFSKKARPEKKPPKPITLFTQKHFSGVRFLKRVIRDASKILKLSESRTITFLEQAIERDGSAPPDVTPPVHNTIMAVTRPFEEWPEVILSKALQKHCYALTKKIKIKTWPKKGPGKKCLAAWSARTKIPLIPGQVQATNGLFDRIGSIYDGVEKKVTNRNANKKLEYDEAIKEGRNPAVPEYETAYNIDGTLINKPGYNPNLYITQSRTPRLITEADRPLVEKILWQMVEKKTQSRNQARRARLEKAAHLQGLPVPKFVPEKVDRSQKIEIRIIDPLDKIEPYMPQDRMAIKASQDGHVPYWQRPFLSKRRNRRVRAGWGKQVSSIQAWLTGALLVIVRLGNEAFLADIRGALRNAQWRKLLKPDATYQSLFNLFTGDPVVNTRTNHLTMAYREGVVNIVKSRSFKGRQTREHLLTLLGQGKTVAGVSFDLGQKHAAGLLAAHFGLGEDGNPVFTPIQACFLPQRYLDSLTNYRNRYDALTLDMRRQSLLALTPAQQQEFADAQRDPGGQAKRACCLKLNLNPDEIRWDLVSGISTMISDLYIERGGDPRDVHQQVETKPKGKRKSEIRILKIRDGKWAYDFRPKIADETRKAQREQLWKLQKASSEFERLSRYKINIARAIANWALQWGRELSGCDIVIPVLEDLNVGSKFFDGKGKWLLGWDNRFTPKKENRWFIKVLHKAVAELAPHRGVPVYEVMPHRTSMTCPACHYCHPTNREGDRFECQSCHVVKNTDRDVAPYNILRVAVEGKTLDRWQAEKKPQAEPDRPMILIDNQES

SEQ ID NO: 6 - protein, 812 aa, synthetic construct
MDMLDTETNYATETPAQQQDYSPKPPKKAQRAPKGFSKKARPEKKPPKPITLFTQKHFSGVRFLKRVIRDASKILKLSESRTITFLEQAIERDGSAPPDVTPPVHNTIMAVTRPFEEWPEVILSKALQKHCYALTKKIKIKTWPKKGPGKKCLAAWSARTKIPLIPGQVQATNGLFDRIGSIYDGVEKKVTNRNANKKLEYDEAIKEGRNPAVPEYETAYNIDGTLINKPGYNPNLYITQSRTPRLITEADRPLVEKILWQMVEKKTQSRNQARRARLEKAAHLQGLPVPKFVPEKVDRSQKIEIRIIDPLDKIEPYMPQDRMAIKASQDGHVPYWQRPFLSKRRNRRVRAGWGKQVSSIQAWLTGALLVIVRLGNEAFLADIRGALRNAQWRKLLKPDATYQSLFNLFTGDPVVNTRTNHLTMAYREGVVDIVKSRSFKGRQTREHLLTLLGQGKTVAGVSFDLGQKHAAGLLAAHFGLGEDGNPVFTPIQACFLPQRYLDSLTNYRNRYDALTLDMRRQSLLALTPAQQQEFADAQRDPGGQAKRACCLKLNLNPDEIRWDLVSGISTMISDLYIERGGDPRDVHQQVETKPKGKRKSEIRILKIRDGKWAYDFRPKIADETRKAQREQLWKLQKASSEFERLSRYKINIARAIANWALQWGRELSGCDIVIPVLEDLNVGSKFFDGKGKWLLGWDNRFTPKKENRWFIKVLHKAVAELAPHKGVPVYEVMPHRTSMTCPACHYCHPTNREGDRFECQSCHVVKNTDRDVAPYNILRVAVEGKTLDRWQAEKKPQAEPDRPMILIDNQES

SEQ ID NO: 7 - protein, 793 aa, synthetic construct
MSSLPTPLELLKQKHADLFKGLQFSSKDNKMAGKVLKKDGEEAALAFLSERGVSRGELPNFRPPAKTLVVAQSRPFEEFPIYRVSEAIQLYVYSLSVKELETVPSGSSTKKEHQRFFQDSSVPDFGYTSVQGLNKIFGLARGIYLGVITRGENQLQKAKSKHEALNKKRRASGEAETEFDPTPYEYMTPERKLAKPPGVNHSIMCYVDISVDEFDFRNPDGIVLPSEYAGYCREINTAIEKGTVDRLGHLKGGPGYIPGHQRKESTTEGPKINFRKGRIRRSYTALYAKRDSRRVRQGKLALPSYRHHMMRLNSNAESAILAVIFFGKDWVVFDLRGLLRNVRWRNLFVDGSTPSTLLGMFGDPVIDPKRGVVAFCYKEQIVPVVSKSITKMVKAPELLNKLYLKSEDPLVLVAIDLGQTNPVGVGVYRVMNASLDYEVVTRFALESELLREIESYRQRTNAFEAQIRAETFDAMTSEEQEEITRVRAFSASKAKENVCHRFGMPVDAVDWATMGSNTIHIAKWVMRHGDPSLVEVLEYRKDNEIKLDKNGVPKKVKLTDKRIANLTSIRLRFSQETSKHYNDTMWELRRKHPVYQKLSKSKADFSRRVVNSIIRRVNHLVPRARIVFIIEDLKNLGKVFHGSGKRELGWDSYFEPKSENRWFIQVLHKAFSETGKHKGYYIIECWPNWTSCTCPKCSCCDSENRHGEVFRCLACGYTCNTDFGTAPDNLVKIATTGKGLPGPKKRCKGSSKGKNPKIARSSETGVSVTESGAPKVKKSSPTQTSQSSSQSAP

SEQ ID NO: 8 - protein, 441 aa, synthetic construct
MNKIEKEKTPLAKLMNENFAGLRFPFAIIKQAGKKLLKEGELKTIEYMTGKGSIEPLPNFKPPVKCLIVAKRRDLKYFPICKASCEIQSYVYSLNYKDFMDYFSTPMTSQKQHEEFFKKSGLNIEYQNVAGLNLIFNNVKNTYNGVILKVKNRNEKLKKKAIKNNYEFEEIKTFNDDGCLINKPGINNVIYCFQSISPKILKNITHLPKEYNDYDCSVDRNIIQKYVSRLDIPESQPGHVPEWQRKLPEFNNTNNPRRRRKWYSNGRNISKGYSVDQVNQAKIEDSLLAQIKIGEDWIILDIRGLLRDLNRRELISYKNKLTIKDVLGFFSDYPIIDIKKNLVTFCYKEGVIQVVSQKSIGNKKSKQLLEKLIENKPIALVSIDLGQTNPVSVKISKLNKINNKISIESFTYRFLNEEILKEIEKYRKDYDKLELKLINEA

SEQ ID NO: 9 - protein, 812 aa, synthetic construct
MDMLDTETNYATETPSQQQDYSPKPPKKDRRAPKGFSKKARPEKKPPKPITLFTQKHFSGVRFLKRVIRDASKILKLSESRTITFLEQAIERDGSAPPDVTPPVHNTIMAVTRPFEEWPEVILSKALQKHCYALTKKIKIKTWPKKGPGKKCLAAWSARTKIPLIPGQVQATNGLFDRIGSIYDGVEKKVTNRNANKKLEYDEAIKEGRNPAVPEYETAYNIDGTLINKPGYNPNLYITQSRTPRLITEADRPLVEKILWQMVEKKTQSRNQARRARLEKAAHLQGLPVPKFVPEKVDRSQKIEIRIIDPLDKIEPYMPQDRMAIKASQDGHVPYWQRPFLSKRRNRRVRAGWGKQVSSIQAWLTGALLVIVRLGNEAFLADIRGALRNAQWRKLLKPDATYQSLFNLFTGDPVVNTRTNHLTMAYREGVVDIVKSRSFKGRQTREHLLTLLGQGKTVAGVSFDLGQKHAAGLLAAHFGLGEDGNPVFTPIQACFLPQRYLDSLTNYRNRYDALTLDMRRQSLLALTPAQQQEFADAQRDPGGQAKRACCLKLNLNPDEIRWDLVSGISTMISDLYIERGGDPRDVHQQVETKPKGKRKSEIRILKIRDGKWAYDFRPKIADETRKAQREQLWKLQKASSEFERLSRYKINIARAIANWALQWGRELSGCDIVIPVLEDLNVGSKFFDGKGKWLLGWDNRFTPKKENRWFIKVLHKAVAELAPHRGVPVYEVMPHRTSMTCPACHYCHPTNREGDRFECQSCHVVKNTDRDVAPYNILRVAVEGKTLDRWQAEKKPQAEPDRPMILIDNQES

SEQ ID NO: 10 - protein, 812 aa, synthetic construct
MDMLDTETNYATETPSQQQDYSPKPPKKDRRAPKGFSKKARPEKKPPKPITLFTQKHFSGVRFLKRVIRDASKILKLSESRTITFLEQAIERDGSAPPDVTPPVHNTIMAVTRPFEEWPEVILSKALQKHCYALTKKIKIKTWPKKGPGKKCLAAWSARTKIPLIPGQVQATNGLFDRIGSIYDGVEKKVTNRNANKKLEYDEAIKEGRNPAVPEYETAYNIDGTLINKPGYNPNLYITQSRTPRLITEADRPLVEKILWQMVEKKTQSRNQARRARLEKAAHLQGLPVPKFVPEKVDRSQKIEIRIIDPLDKIEPYMPQDRMAIKASQDGHVPYWQRPFLSKRRNRRVRAGWGKQVSSIQAWLTGALLVIVRLGNEAFLADIRGALRNAQWRKLLKPDATYQSLFNLFTGDPVVNTRTNHLTMAYREGVVNIVKSRSFKGRQTREHLLTLLGQGKTVAGVSFDLGQKHAAGLLAAHFGLGEDGNPVFTPIQACFLPQRYLDSLTNYRNRYDALTLDMRRQSLLALTPAQQQEFADAQRDPGGQAKRACCLKLNLNPDEIRWDLVSGISTMISDLYIERGGDPRDVHQQVETKPKGKRKSEIRILKIRDGKWAYDFRPKIADETRKAQREQLWKLQKASSEFERLSRYKINIARAIANWALQWGRELSGCDIVIPVLEDLNVGSKFFDGKGKWLLGWDNRFTPKKENRWFIKVLHKAVAELAPHRGVPVYEVMPHRTSMTCPACHYCHPTNREGDRFECQSCHVVKNTDRDVAPYNILRVAVEGKTLDRWQAEKKPQAEPDRPMILIDNQES

SEQ ID NO: 11 - protein, 761 aa, synthetic construct
MSNKTTPPSPLSLLLRAHFPGLKFESQDYKIAGKKLRDGGPEAVISYLTGKGQAKLKDVKPPAKAFVIAQSRPFIEWDLVRVSRQIQEKIFGIPATKGRPKQDGLSETAFNEAVASLEVDGKSKLNEETRAAFYEVLGLDAPSLHAQAQNALIKSAISIREGVLKKVENRNEKNLSKTKRRKEAGEEATFVEEKAHDERGYLIHPPGVNQTIPGYQAVVIKSCPSDFIGLPSGCLAKESAEALTDYLPHDRMTIPKGQPGYVPEWQHPLLNRRKNRRRRDWYSASLNKPKATCSKRSGTPNRKNSRTDQIQSGRFKGAIPVLMRFQDEWVIIDIRGLLRNARYRKLLKEKSTIPDLLSLFTGDPSIDMRQGVCTFIYKAGQACSAKMVKTKNAPEILSELTKSGPVVLVSIDLGQTNPIAAKVSRVTQLSDGQLSHETLLRELLSNDSSDGKEIARYRVASDRLRDKLANLAVERLSPEHKSEILRAKNDTPALCKARVCAALGLNPEMIAWDKMTPYTEFLATAYLEKGGDRKVATLKPKNRPEMLRRDIKFKGTEGVRIEVSPEAAEAYREAQWDLQRTSPEYLRLSTWKQELTKRILNQLRHKAAKSSQCEVVVMAFEDLNIKMMHGNGKWADGGWDAFFIKKRENRWFMQAFHKSLTELGAHKGVPTIEVTPHRTSITCTKCGHCDKANRDGERFACQKCGFVAHADLEIATDNIERVALTGKPMPKPESERSGDAKKSVGARKAAFKPEEDAEAAE

SEQ ID NO: 12 - protein, 717 aa, synthetic construct
MIKPTVSQFLTPGFKLIRNHSRTAGLKLKNEGEEACKKFVRENEIPKDECPNFQGGPAIANIIAKSREFTEWEIYQSSLAIQEVIFTLPKDKLPEPILKEEWRAQWLSEHGLDTVPYKEAAGLNLIIKNAVNTYKGVQVKVDNKNKNNLAKINRKNEIAKLNGEQEISFEEIKAFDDKGYLLQKPSPNKSIYCYQSVSPKPFITSKYHNVNLPEEYIGYYRKSNEPIVSPYQFDRLRIPIGEPGYVPKWQYTFLSKKENKRRKLSKRIKNVSPILGIICIKKDWCVFDMRGLLRTNHWKKYHKPTDSINDLFDYFTGDPVIDTKANVVRFRYKMENGIVNYKPVREKKGKELLENICDQNGSCKLATVDVGQNNPVAIGLFELKKVNGELTKTLISRHPTPIDFCNKITAYRERYDKLESSIKLDAIKQLTSEQKIEVDNYNNNFTPQNTKQIVCSKLNINPNDLPWDKMISGTHFISEKAQVSNKSEIYFTSTDKGKTKDVMKSDYKWFQDYKPKLSKEVRDALSDIEWRLRRESLEFNKLSKSREQDARQLANWISSMCDVIGIENLVKKNNFFGGSGKREPGWDNFYKPKKENRWWINAIHKALTELSQNKGKRVILLPAMRTSITCPKCKYCDSKNRNGEKFNCLKCGIELNADIDVATENLATVAITAQSMPKPTCERSGDAKKPVRARKAKAPEFHDKLAPSYTVVLREAV

SEQ ID NO: 13 - protein, 781 aa, synthetic construct
MRQPAEKTAFQVFRQEVIGTQKLSGGDAKTAGRLYKQGKMEAAREWLLKGARDDVPPNFQPPAKCLVVAVSHPFEEWDISKTNHDVQAYIYAQPLQAEGHLNGLSEKWEDTSADQHKLWFEKTGVPDRGLPVQAINKIAKAAVNRAFGVVRKVENRNEKRRSRDNRIAEHNRENGLTEVVREAPEVATNADGFLLHPPGIDPSILSYASVSPVPYNSSKHSFVRLPEEYQAYNVEPDAPIPQFVVEDRFAIPPGQPGYVPEWQRLKCSTNKHRRMRQWSNQDYKPKAGRRAKPLEFQAHLTRERAKGALLVVMRIKEDWVVFDVRGLLRNVEWRKVLSEEAREKLTLKGLLDLFTGDPVIDTKRGIVTFLYKAEITKILSKRTVKTKNARDLLLRLTEPGEDGLRREVGLVAVDLGQTHPIAAAIYRIGRTSAGALESTVLHRQGLREDQKEKLKEYRKRHTALDSRLRKEAFETLSVEQQKEIVTVSGSGAQITKDKVCNYLGVDPSTLPWEKMGSYTHFISDDFLRRGGDPNIVHFDRQPKKGKVSKKSQRIKRSDSQWVGRMRPRLSQETAKARMEADWAAQNENEEYKRLARSKQELARWCVNTLLQNTRCITQCDEIVVVIEDLNVKSLHGKGAREPGWDNFFTPKTENRWFIQILHKTFSELPKHRGEHVIEGCPLRTSITCPACSYCDKNSRNGEKFVCVACGATFHADFEVATYNLVRLATTGMPMPKSLERQGGGEKAGGARKARKKAKQVEKIVVQANANVTMNGASLHSP

SEQ ID NO: 14 - protein, 793 aa, synthetic construct; identical to SEQ ID NO: 7

SEQ ID NO: 15 - protein, 717 aa, synthetic construct; identical to SEQ ID NO: 12

SEQ ID NO: 16 - protein, 761 aa, synthetic construct; identical to SEQ ID NO: 11

SEQ ID NO: 17 - protein, 765 aa, synthetic construct
MYSLEMADLKSEPSLLAKLLRDRFPGKYWLPKYWKLAEKKRLTGGEEAACEYMADKQLDSPPPNFRPPARCVILAKSRPFEDWPVHRVASKAQSFVIGLSEQGFAALRAAPPSTADARRDWLRSHGASEDDLMALEAQLLETIMGNAISLHGGVLKKIDNANVKAAKRLSGRNEARLNKGLQELPPEQEGSAYGADGLLVNPPGLNLNIYCRKSCCPKPVKNTARFVGHYPGYLRDSDSILISGTMDRLTIIEGMPGHIPAWQREQGLVKPGGRRRRLSGSESNMRQKVDPSTGPRRSTRSGTVNRSNQRTGRNGDPLLVEIRMKEDWVLLDARGLLRNLRWRESKRGLSCDHEDLSLSGLLALFSGDPVIDPVRNEVVFLYGEGIIPVRSTKPVGTRQSKKLLERQASMGPLTLISCDLGQTNLIAGRASAISLTHGSLGVRSSVRIELDPEIIKSFERLRKDADRLETEILTAAKETLSDEQRGEVNSHEKDSPQTAKASLCRELGLHPPSLPWGQMGPSTTFIADMLISHGRDDDAFLSHGEFPTLEKRKKFDKRFCLESRPLLSSETRKALNESLWEVKRTSSEYARLSQRKKEMARRAVNFVVEISRRKTGLSNVIVNIEDLNVRIFHGGGKQAPGWDGFFRPKSENRWFIQAIHKAFSDLAAHHGIPVIESDPQRTSMTCPECGHCDSKNRNGVRFLCKGCGASMDADFDAACRNLERVALTGKPMPKPSTSCERLLSATTGKVCSDHSLSHDAIEKAS

SEQ ID NO: 18 - protein, 766 aa, synthetic construct
MEKEITELTKIRREFPNKKFSSTDMKKAGKLLKAEGPDAVRDFLNSCQEIIGDFKPPVKTNIVSISRPFEEWPVSMVGRAIQEYYFSLTKEELESVHPGTSSEDHKSFFNITGLSNYNYTSVQGLNLIFKNAKAIYDGTLVKANNKNKKLEKKFNEINHKRSLEGLPIITPDFEEPFDENGHLNNPPGINRNIYGYQGCAAKVFVPSKHKMVSLPKEYEGYNRDPNLSLAGFRNRLEIPEGEPGHVPWFQRMDIPEGQIGHVNKIQRFNFVHGKNSGKVKFSDKTGRVKRYHHSKYKDATKPYKFLEESKKVSALDSILAIITIGDDWVVFDIRGLYRNVFYRELAQKGLTAVQLLDLFTGDPVIDPKKGVVTFSYKEGVVPVFSQKIVPRFKSRDTLEKLTSQGPVALLSVDLGQNEPVAARVCSLKNINDKITLDNSCRISFLDDYKKQIKDYRDSLDELEIKIRLEAINSLETNQQVEIRDLDVFSADRAKANTVDMFDIDPNLISWDSMSDARVSTQISDLYLKNGGDESRVYFEINNKRIKRSDYNISQLVRPKLSDSTRKNLNDSIWKLKRTSEEYLKLSKRKLELSRAVVNYTIRQSKLLSGINDIVIILEDLDVKKKFNGRGIRDIGWDNFFSSRKENRWFIPAFHKTFSELSSNRGLCVIEVNPAWTSATCPDCGFCSKENRDGINFTCRKCGVSYHADIDVATLNIARVAVLGKPMSGPADRERLGDTKKPRVARSRKTMKRKDISNSTVEAMVTA

SEQ ID NO: 19 - protein, 870 aa, synthetic construct
MLVRTSTLVQDNKNSRSASRAFLKKPKMPKNKHIKEPTELAKLIRELFPGQRFTRAINTQAGKILKHKGRDEVVEFLKNKGIDKEQFMDFRPPTKARIVATSGAIEEFSYLRVSMAIQECCFGKYKFPKEKVNGKLVLETVGLTKEELDDFLPKKYYENKKSRDRFFLKTGICDYGYTYAQGLNEIFRNTRAIYEGVFTKVNNRNEKRREKKDKYNEERRSKGLSEEPYDEDESATDESGHLINPPGVNLNIWTCEGFCKGPYVTKLSGTPGYEVILPKVFDGYNRDPNEIISCGITDRFAIPEGEPGHIPWHQRLEIPEGQPGYVPGHQRFADTGQNNSGKANPNKKGRMRKYYGHGTKYTQPGEYQEVFRKGHREGNKRRYWEEDFRSEAHDCILYVIHIGDDWVVCDLRGPLRDAYRRGLVPKEGITTQELCNLFSGDPVIDPKHGVVTFCYKNGLVRAQKTISAGKKSRELLGALTSQGPIALIGVDLGQTEPVGARAFIVNQARGSLSLPTLKGSFLLTAENSSSWNVFKGEIKAYREAIDDLAIRLKKEAVATLSVEQQTEIESYEAFSAEDAKQLACEKFGVDSSFILWEDMTPYHTGPATYYFAKQFLKKNGGNKSLIEYIPYQKKKSKKTPKAVLRSDYNIACCVRPKLLPETRKALNEAIRIVQKNSDEYQRLSKRKLEFCRRVVNYLVRKAKKLTGLERVIIAIEDLKSLEKFFTGSGKRDNGWSNFFRPKKENRWFIPAFHKAFSELAPNRGFYVIECNPARTSITDPDCGYCDGDNRDGIKFECKKCGAKHHTDLDVAPLNIAIVAVTGRPMPKTVSNKSKRERSGGEKSVGASRKRNHRKSKANQEMLDATSSAAE

SEQ ID NO: 20 - protein, 830 aa, synthetic construct
MPKIKKPTEISLLRKEVFPDLHFAKDRMRAASLVLKNEGREAAIEYLRVNHEDKPPNFMPPAKTPYVALSRPLEQWPIAQASIAIQKYIFGLTKDEFSATKKLLYGDKSTPNTESRKRWFEVTGVPNFGYMSAQGLNAIFSGALARYEGVVQKVENRNKKRFEKLSEKNQLLIEEGQPVKDYVPDTAYHTPETLQKLAENNHVRVEDLGDMIDRLVHPPGIHRSIYGYQQVPPFAYDPDNPKGIILPKAYAGYTRKPHDIIEAMPNRLNIPEGQAGYIPEHQRDKLKKGGRVKRLRTTRVRVDATETVRAKAEALNAEKARLRGKEAILAVFQIEEDWALIDMRGLLRNVYMRKLIAAGELTPTTLLGYFTETLTLDPRRTEATFCYHLRSEGALHAEYVRHGKNTRELLLDLTKDNEKIALVTIDLGQRNPLAAAIFRVGRDASGDLTENSLEPVSRMLLPQAYLDQIKAYRDAYDSFRQNIWDTALASLTPEQQRQILAYEAYTPDDSKENVLRLLLGGNVMPDDLPWEDMTKNTHYISDRYLADGGDPSKVWFVPGPRKRKKNAPPLKKPPKPRELVKRSDHNISHLSEFRPQLLKETRDAFEKAKIDTERGHVGYQKLSTRKDQLCKEILNWLEAEAVRLTRCKTMVLGLEDLNGPFFNQGKGKVRGWVSFFRQKQENRWIVNGFRKNALARAHDKGKYILELWPSWTSQTCPKCKHVHADNRHGDDFVCLQCGARLHADAEVATWNLAVVAIQGHSLPGPVREKSNDRKKSGSARKSKKANESGKVVGAWAAQATPKRATSKKETGTARNPVYNPLETQASCPAP

SEQ ID NO: 21 - protein, 790 aa, synthetic construct
MTPSPQIARLVETPLAAALKAHHPGKKFRSDYLKKAGKILKDQGVEAAMAHLDGKDQAEPPNFKPPAKCRIVARSREFSEWPIVKASVEIQKYIYGLTLEERKACDPGKSSASHKAWFAKTGVNTFGYSSVQGFNLIFGHTLGRYDGVLVKTENLNKKRAEKNERFRAKALAEGRAEPVCPPLVTATNDTGQDVTLEDGRVVRPGQLLQPPGINPNIYAYQQVSPKAYVPGIIELPEEFQGYSRDPNAVILPLVPRDRLSIPKGQPGYVPEPHREGLTGRKDRRMRRYYETERGTKLKRPPLTAKGRADKANEALLVVVRIDSDWVVMDVRGLLRNARWRRLVSKEGITLNGLLDLFTGDPVLNPKDCSVSRDTGDPVNDPRHGVVTFCYKLGVVDVCSKDRPIKGFRTKEVLERLTSSGTVGMVSIDLGQTNPVAAAVSRVTKGLQAETLETFTLPDDLLGKVRAYRAKTDRMEEGFRRNALRKLTAEQQAEITRYNDATEQQAKALVCSTYGIGPEEVPWERMTSNTTYISDHILDHGGDPDTVFFMATKRGQNKPTLHKRKDKAWGQKFRPAISVETRLARQAAEWELRRASLEFQKLSVWKTELCRQAVNYVMERTKKRTQCDVIIPVIEDLPVPLFHGSGKRDPGWANFFVHKRENRWFIDGLHKAFSELGKHRGIYVFEVCPQRTSITCPKCGHCDPDNRDGEKFVCLSCQATLNADLDVATTNLVRVALTGKVMPRSERSGDAQTPGPARKARTGKIKGSKPTSAPQGATQTDAKAHLSQTGV

SEQ ID NO: 22 - protein, 790 aa, synthetic construct
MTPSPQIARLVETPLAAALKAHHPGKKFRSDYLKKAGKILKDQGVEAAMAHLDGKDQAEPPNFKPPAKCRIVARSREFSEWPIVKASVEIQKYIYGLTLEERKACDPGKSSASHKAWFAKTGVNTFGYSSVQGFNLIFGHTLGRYDGVLVKTENLNKKRAEKNERFRAKALAEGRAEPVCPPLVTATNDTGQDVTLEDGRVVRPGQLLQPPGINPNIYAYQQVSPKAYVPGIIELPEEFQGYSRDPNAVILPLVPRDRLSIPKGQPGYVPEPHREGLTGRKDRRMRRYYETERGTKLKRPPLTAKGRADKANEALLVVVRIDSDWVVMDVRGLLRNARWRRLVSKEGITLNGLLDLFTGDPVLNPKDCSVSRDTGDPVNDPRHGVVTFCYKLGVVDVCSKDRPIKGFRTKEVLERLTSSGTVGMVSIDLGQTNPVAAAVSRVTKGLQAETLETFTLPDDLLGKVRAYRAKTDRMEEGFRRNALRKLTAEQQAEITRYNDATEQQAKALVCSTYGIGPEEVPWERMTSNTTYISDHILDHGGDPDTVFFMATKRGQNKPTLHKRKDKAWGQKFRPAISVETRLARQAAEWELRRASLEFQKLSVWKTELCRQAVNYVMERTKKRTQCDVIIPVIEDLPVPLFHGSGKRDPGWANFFVHKRENRWFIDGLHKAFSELGKHRGIYVFEVCPQRTSITCPKCGHCDPDNRDGEKFVCLSCQATLHADLDVATTNLVRVALTGKVMPRSERSGDAQTPGPARKARTGKIKGSKPTSAPQGATQTDAKAHLSQTGV

SEQ ID NO: 23 - protein, 782 aa, synthetic construct
MKTEKPKTALTLLREEVFPGKKYRLDVLKEAGKKLSTKGREATIEFLTGKDEERPQNFQPPAKTSIVAQSRPFDQWPIVQVSLAVQKYIYGLTQSEFEANKKALYGETGKAISTESRRAWFEATGVDNFGFTAAQGINPIFSQAVARYEGVIKKVENRNEKKLKKLTKKNLLRLESGEEIEDFEPEATFNEEGRLLQPPGANPNIYCYQQISPRIYDPSDPKGVILPQIYAGYDRKPEDIISAGVPNRLAIPEGQPGYIPEHQRAGLKTQGRIRCRASVEAKARAAILAVVHLGEDWVVLDLRGLLRNVYWRKLASPGTLTLKGLLDFFTGGPVLDARRGIATFSYTLKSAAAVHAENTYKGKGTREVLLKLTENNSVALVTVDLGQRNPLAAMIARVSRTSQGDLTYPESVEPLTRLFLPDPFLEEVRKYRSSYDALRLSIREAAIASLTPEQQAEIRYIEKFSAGDAKKNVAEVFGIDPTQLPWDAMTPRTTYISDLFLRMGGDRSRVFFEVPPKKAKKAPKKPPKKPAGPRIVKRTDGMIARLREIRPRLSAETNKAFQEARWEGERSNVAFQKLSVRRKQFARTVVNHLVQTAQKMSRCDTVVLGIEDLNVPFFHGRGKYQPGWEGFFRQKKENRWLINDMHKALSERGPHRGGYVLELTPFWTSLRCPKCGHTDSANRDGDDFVCVKCGAKLHSDLEVATANLALVAITGQSIPRPPREQSSGKKSTGTARMKKTSGETQGKGSKACVSEALNKIEQGTARDPVYNPLNSQVSCPAP

SEQ ID NO: 24 - protein, 774 aa, synthetic construct
VYNPDMKKPNNIRRIREEHFEGLCFGKDVLTKAGKIYEKDGEEAAIDFLMGKDEEDPPNFKPPAKTTIVAQSRPFDQWPIYQVSQAVQERVFAYTEEEFNASKEALFSGDISSKSRDFWFKTNNISDQGIGAQGLNTILSHAFSRYSGVIKKVENRNKKRLKKLSKKNQLKIEEGLEILEFKPDSAFNENGLLAQPPGINPNIYGYQAVTPFVFDPDNPGDVILPKQYEGYSRKPDDIIEKGPSRLDIPKGQPGYVPEHQRKNLKKKGRVRLYRRTPPKTKALASILAVLQIGKDWVLFDMRGLLRSVYMREAATPGQISAKDLLDTFTGCPVLNTRTGEFTFCYKLRSEGALHARKIYTKGETRTLLTSLTSENNTIALVTVDLGQRNPAAIMISRLSRKEELSEKDIQPVSRRLLPDRYLNELKRYRDAYDAFRQEVRDEAFTSLCPEHQEQVQQYEALTPEKAKNLVLKHFFGTHDPDLPWDDMTSNTHYIANLYLERGGDPSKVFFTRPLKKDSKSKKPRKPTKRTDASISRLPEIRPKMPEDARKAFEKAKWEIYTGHEKFPKLAKRVNQLCREIANWIEKEAKRLTLCDTVVVGIEDLSLPPKRGKGKFQETWQGFFRQKFENRWVIDTLKKAIQNRAHDKGKYVLGLAPYWTSQRCPACGFIHKSNRNGDHFKCLKCEALFHADSEVATWNLALVAVLGKGITNPDSKKPSGQKKTGTTRKKQIKGKNKGKETVNVPPTTQEVEDIIAFFEKDDETVRNPVYKPTGT

SEQ ID NO: 25 - protein, 769 aa, synthetic construct
MKKPNNIRRIREEHFEGLCFGKDVLTKAGKIYEKDGEEAAIDFLMGKDEEDPPNFKPPAKTTIVAQSRPFDQWPIYQVSQAVQERVFAYTEEEFNASKEALFSGDISSKSRDFWFKTNNISDQGIGAQGLNTILSHAFSRYSGVIKKVENRNKKRLKKLSKKNQLKIEEGLEILEFKPDSAFNENGLLAQPPGINPNIYGYQAVTPFVFDPDNPGDVILPKQYEGYSRKPDDIIEKGPSRLDIPKGQPGYVPEHQRKNLKKKGRVRLYRRTPPKTKALASILAVLQIGKDWVLFDMRGLLRSVYMREAATPGQISAKDLLDTFTGCPVLNTRTGEFTFCYKLRSEGALHARKIYTKGETRTLLTSLTSENNTIALVTVDLGQRNPAAIMISRLSRKEELSEKDIQPVSRRLLPDRYLNELKRYRDAYDAFRQEVRDEAFTSLCPEHQEQVQQYEALTPEKAKNLVLKHFFGTHDPDLPWDDMTSNTHYIANLYLERGGDPSKVFFTRPLKKDSKSKKPRKPTKRTDASISRLPEIRPKMPEDARKAFEKAKWEIYTGHEKFPKLAKRVNQLCREIANWIEKEAKRLTLCDTVVVGIEDLSLPPKRGKGKFQETWQGFFRQKFENRWVIDTLKKAIQNRAHDKGKYVLGLAPYWTSQRCPACGFIHKSNRNGDHFKCLKCEALFHADSEVATWNLALVAVLGKGITNPDSKKPSGQKKTGTTRKKQIKGKNKGKETVNVPPTTQEVEDIIAFFEKDDETVRNPVYKPTGT

SEQ ID NO: 26 - protein, 767 aa, synthetic construct
VIKTHFPAGRFRKDHQKTAGKKLKHEGEEACVEYLRNKVSDYPPNFKPPAKGTIVAQSRPFSEWPIVRASEAIQKYVYGLTVAELDVFSPGTSKPSHAEWFAKTGVENYGYRQVQGLNTIFQNTVNRFKGVLKKVENRNKKSLKRQEGANRRRVEEGLPEVPVTVESATDDEGRLLQPPGVNPSIYGYQGVAPRVCTDLQGFSGMSVDFAGYRRDPDAVLVESLPEGRLSIPKGERGYVPEWQRDPERNKFPLREGSRRQRKWYSNACHKPKPGRTSKYDPEALKKASAKDALLVSISIGEDWAIIDVRGLLRDARRRGFTPEEGLSLNSLLGLFTEYPVFDVQRGLITFTYKLGQVDVHSRKTVPTFRSRALLESLVAKEEIALVSVDLGQTNPASMKVSRVRAQEGALVAEPVHRMFLSDVLLGELSSYRKRMDAFEDAIRAQAFETMTPEQQAEITRVCDVSVEVARRRVCEKYSISPQDVPWGEMTGHSTFIVDAVLRKGGDESLVYFKNKEGETLKFRDLRISRMEGVRPRLTKDTRDALNKAVLDLKRAHPTFAKLAKQKLELARRCVNFIEREAKRYTQCERVVFVIEDLNVGFFHGKGKRDRGWDAFFTAKKENRWVIQALHKAFSDLGLHRGSYVIEVTPQRTSMTCPRCGHCDKGNRNGEKFVCLQCGATLHADLEVATDNIERVALTGKAMPKPPVRERSGDVQKAGTARKARKPLKPKQKTEPSVQEGSSDDGVDKSPGDASRNPVYNPSDTLSI

SEQ ID NO: 27 - protein, 763 aa, synthetic construct
MAKAKTLAALLRELLPGQHLAPHHRWVANKLLMTSGDAAAFVIGKSVSDPVRGSFRKDVITKAGRIFKKDGPDAAAAFLDGKWEDRPPNFQPPAKAAIVAISRSFDEWPIVKVSCAIQQYLYALPVQEFESSVPEARAQAHAAWFQDTGVDDCNFKSTQGLNAIFNHGKRTYEGVLKKAQNRNDKKNLRLERINAKRAEAGQAPLVAGPDESPTDDAGCLLHPPGINANIYCYQQVSPRPYEQSCGIQLPPEYAGYNRLSNVAIPPMPNRLDIPQGQPGYVPEHHRHGIKKFGRVRKRYGVVPGRNRDADGKRTRQVLTEAGAAAKARDSVLAVIRIGDDWTVVDLRGLLRNAQWRKLVPDGGITVQGLLDLFTGDPVIDPRRGVVTFIYKADSVGIHSEKVCRGKQSKNLLERLCAMPEKSSTRLDCARQAVALVSVDLGQRNPVAARFSRVSLAEGQLQAQLVSAQFLDDAMVAMIRSYREEYDRFESLVREQAKAALSPEQLSEIVRHEADSAESVKSCVCAKFGIDPAGLSWDKMTSGTWRIADHVQAAGGDVEWFFFKTCGKGKEIKTVRRSDFNVAKQFRLRLSPETRKDWNDAIWELKRGNPAYVSFSKRKSEFARRVVNDLVHRARRAVRCDEVVFAIEDLNISFFHGKGQRQMGWDAFFEVKQENRWFIQALHKAFVERATHKGGYVLEVAPARTSTTCPECRHCDPESRRGEQFCCIKCRHTCHADLEVATFNIEQVALTGVSLPKRLSSTLL

SEQ ID NO: 28 - protein, 761 aa, synthetic construct
MSKEKTPPSAYAILKAKHFPDLDFEKKHKMMAGRMFKNGASEQEVVQYLQGKGSESLMDVKPPAKSPILAQSRPFDEWEMVRTSRLIQETIFGIPKRGSIPKRDGLSETQFNELVASLEVGGKPMLNKQTRAIFYGLLGIKPPTFHAMAQNILIDLAINIRKGVLKKVDNLNEKNRKKVKRIRDAGEQDVMVPAEVTAHDDRGYLNHPPGVNPTIPGYQGVVIPFPEGFEGLPSGMTPVDWSHVLVDYLPHDRLSIPKGSPGYIPEWQRPLLNRHKGRRHRSWYANSLNKPRKSRTEEAKDRQNAGKRTALIEAERLKGVLPVLMRFKEDWLIIDARGLLRNARYRGVLPEGSTLGNLIDLFSDSPRVDTRRGICTFLYRKGRAYSTKPVKRKESKETLLKLTEKSTIALVSIDLGQTNPLTAKLSKVRQVDGCLVAEPVLRKLIDNASEDGKEIARYRVAHDLLRARILEDAIDLLGIYKDEVVRARSDTPDLCKERVCRFLGLDSQAIDWDRMTPYTDFIAQAFVAKGGDPKVVTIKPNGKPKMFRKDRSIKNMKGIRLDISKEASSAYREAQWAIQRESPDFQRLAVWQSQLTKRIVNQLVAWAKKCTQCDTVVLAFEDLNIGMMHGSGKWANGGWNALFLHKQENRWFMQAFHKALTELSAHKGIPTIEVLPHRTSITCTQCGHCHPGNRDGERFKCLKCEFLANTDLEIATDNIERVALTGLPMPKGERSSAKRKPGGTRKTKKSKHSGNSPLAAE

SEQ ID NO: 29 - protein, 746 aa, synthetic construct
MEKAGPTSPLSVLIHKNFEGCRFQIDHLKIAGRKLAREGEAAAIEYLLDKKCEGLPPNFQPPAKGNVIAQSRPFTEWAPYRASVAIQKYIYSLSVDERKVCDPGSSSDSHEKWFKQTGVQNYGYTHVQGLNLIFKHALARYDGVLKKVDNRNEKNRKKAERVNSFRREEGLPEEVFEEEKATDETGHLLQPPGVNHSIYCYQSVRPKPFNPRKPGGISLPEAYSGYSLKPQDELPIGSLDRLSIPPGQPGYVPEWQRSQLTTQKHRRKRSWYSAQKWKPRTGRTSTFDPDRLNCARAQGAILAVVRIHEDWVVFDVRGLLRNALWRELAGKGLTVRDLLDFFTGDPVVDTKRGVVTFTYKLGKVDVHSLRTVRGKRSKKVLEDLTLSSDVGLVTIDLGQTNVLAADYSKVTRSENGELLAVPLSKSFLPKHLLHEVTAYRTSYDQMEEGFRRKALLTLTEDQQVEVTLVRDFSVESSKTKLLQLGVDVTSLPWEKMSSNTTYISDQLLQQGADPASLFFDGERDGKPCRHKKKDRTWAYLVRPKVSPETRKALNEALWALKNTSPEFESLSKRKIQFSRRCMNYLLNEAKRISGCGQVVFVIEDLNVRVHHGRGKRAIGWDNFFKPKRENRWFMQALHKAASELAIHRGMHIIEACPARSSITCPKCGHCDPENRCSSDREKFLCVKCGAAFHADLEVATFNLRKVALTGTALPKSIDHSRDGLIPKGARNRKLKEPQANDEKACA

SEQ ID NO: 30 - protein, 735 aa, synthetic construct
MKEQSPLSSVLKSNFPGKKFLSADIRVAGRKLAQLGEAAAVEYLSPRQRDSVPNFRPPAFCTVVAKSRPFEEWPIYKASVLLQEQIYGMTGQEFEERCGSIPTSLSGLRQWASSVGLGAAMEGLHVQGMNLMVKNAINRYKGVLVKVENRNKKLVEANEAKNSSREERGLPPLRPPELGSAFGPDGRLVNPPGIDKSIRLYQGVSPVPVVKTTGRPTVHRLDIPAGEKGHVPLWQREAGLVKEGPRRRRMWYSNSNLKRSRKDRSAEASEARKADSVVVRVSVKEDWVDIDVRGLLRNVAWRGIERAGESTEDLLSLFSGDPVVDPSRDSVVFLYKEGVVDVLSKKVVGAGKSRKQLEKMVSEGPVALVSCDLGQTNYVAARVSVLDESLSPVRSFRVDPREFPSADGSQGVVGSLDRIRADSDRLEAKLLSEAEASLPEPVRAEIEFLRSERPSAVAGRLCLKLGIDPRSIPWEKMGSTTSFISEALSAKGSPLALHDGAPIKDSRFAHAARGRLSPESRKALNEALWERKSSSREYGVISRRKSEASRRMANAVLSESRRLTGLAVVAVNLEDLNMVSKFFHGRGKRAPGWAGFFTPKMENRWFIRSIHKAMCDLSKHRGITVIESRPERTSISCPECGHCDPENRSGERFSCKSCGVSLHADFEVATRNLERVALTGKPMPRRENLHSPEGATASRKTRKKPREATASTFLDLRSVLSSAENEGSGPAARAG

SEQ ID NO: 31 - protein, 725 aa, synthetic construct
MLPPSNKIGKSMSLKEFINKRNFKSSIIKQAGKILKKEGEEAVKKYLDDNYVEGYKKRDFPITAKCNIVASNRKIEDFDISKFSSFIQNYVFNLNKDNFEEFSKIKYNRKSFDELYKKIANEIGLEKPNYENIQGEIAVIRNAINIYNGVLKKVENRNKKIQEKNQSKDPPKLLSAFDDNGFLAERPGINETIYGYQSVRLRHLDVEKDKDIIVQLPDIYQKYNKKSTDKISVKKRLNKYNVDEYGKLISKRRKERINKDDAILCVSNFGDDWIIFDARGLLRQTYRYKLKKKGLCIKDLLNLFTGDPIINPTKTDLKEALSLSFKDGIINNRTLKVKNYKKCPELISELIRDKGKVAMISIDLGQTNPISYRLSKFTANNVAYIENGVISEDDIVKMKKWREKSDKLENLIKEEAIASLSDDEQREVRLYENDIADNTKKKILEKFNIREEDLDFSKMSNNTYFIRDCLKNKNIDESEFTFEKNGKKLDPTDACFAREYKNKLSELTRKKINEKIWEIKKNSKEYHKISIYKKETIRYIVNKLIKQSKEKSECDDIIVNIEKLQIGGNFFGGRGKRDPGWNNFFLPKEENRWFINACHKAFSELAPHKGIIVIESDPAYTSQTCPKCENCDKENRNGEKFKCKKCNYEANADIDVATENLEKIAKNGRRLIKNFDQLGERLPGAEMPGGARKRKPSKSLPKNGRGAGVGSEPELINQSPSQVIA

SEQ ID NO: 32 - protein, 718 aa, synthetic construct
VPDKKETPLVALCKKSFPGLRFKKHDSRQAGRILKSKGEGAAVAFLEGKGGTTQPNFKPPVKCNIVAMSRPLEEWPIYKASVVIQKYVYAQSYEEFKATDPGKSEAGLRAWLKATRVDTDGYFNVQGLNLIFQNARATYEGVLKKVENRNSKKVAKIEQRNEHRAERGLPLLTLDEPETALDETGHLRHRPGINCSVFGYQHMKLKPYVPGSIPGVTGYSRDPSTPIAACGVDRLEIPEGQPGYVPPWDRENLSVKKHRRKRASWARSRGGAIDDNMLLAVVRVADDWALLDLRGLLRNTQYRKLLDRSVPVTIESLLNLVTNDPTLSVVKKPGKPVRYTATLIYKQGVVPVVKAKVVKGSYVSKMLDDTTETFSLVGVDLGVNNLIAANALRIRPGKCVERLQAFTLPEQTVEDFFRFRKAYDKHQENLRLAAVRSLTAEQQAEVLALDTFGPEQAKMQVCGHLGLSVDEVPWDKVNSRSSILSDLAKERGVDDTLYMFPFFKGKGKKRKTEIRKRWDVNWAQHFRPQLTSETRKALNEAKWEAERNSSKYHQLSIRKKELSRHCVNYVIRTAEKRAQCGKVIVAVEDLHHSFRRGGKGSRKSGWGGFFAAKQEGRWLMDALFGAFCDLAVHRGYRVIKVDPYNTSRTCPECGHCDKANRDRVNREAFICVCCGYRGNADIDVAAYNIAMVAITGVSLRKAARASVASTPLESLAAE

SEQ ID NO: 33 - protein, 708 aa, synthetic construct
MSKTKELNDYQEALARRLPGVRHQKSVRRAARLVYDRQGEDAMVAFLDGKEVDEPYTLQPPAKCHILAVSRPIEEWPIARVTMAVQEHVYALPVHEVEKSRPETTEGSRSAWFKNSGVSNHGVTHAQTLNAILKNAYNVYNGVIKKVENRNAKKRDSLAAKNKSRERKGLPHFKADPPELATDEQGYLLQPPSPNSSVYLVQQHLRTPQIDLPSGYTGPVVDPRSPIPSLIPIDRLAIPPGQPGYVPLHDREKLTSNKHRRMKLPKSLRAQGALPVCFRVFDDWAVVDGRGLLRHAQYRRLAPKNVSIAELLELYTGDPVIDIKRNLMTFRFAEAVVEVTARKIVEKYHNKYLLKLTEPKGKPVREIGLVSIDLNVQRLIALAIYRVHQTGESQLALSPCLHREILPAKGLGDFDKYKSKFNQLTEEILTAAVQTLTSAQQEEYQRYVEESSHEAKADLCLKYSITPHELAWDKMTSSTQYISRWLRDHGWNASDFTQITKGRKKVERLWSDSRWAQELKPKLSNETRRKLEDAKHDLQRANPEWQRLAKRKQEYSRHLANTVLSMAREYTACETVVIAIENLPMKGGFVDGNGSRESGWDNFFTHKKENRWMIKDIHKALSDLAPNRGVHVLEVNPQYTSQTCPECGHRDKANRDPIQRERFCCTHCGAQRHADLEVATHNIAMVATTGKSLTGKSLAPQRLQEAAE

SEQ ID NO: 34 - protein, 491 aa, synthetic construct
VLLSDRIQYTDPSAPIPAMTVVDRRKIKKGEPGYVPPFMRKNLSTNKHRRMRLSRGQKEACALPVGLRLPDGKDGWDFIIFDGRALLRACRRLRLEVTSMDDVLDKFTGDPRIQLSPAGETIVTCMLKPQHTGVIQQKLITGKMKDRLVQLTAEAPIAMLTVDLGEHNLVACGAYTVGQRRGKLQSERLEAFLLPEKVLADFEGYRRDSDEHSETLRHEALKALSKRQQREVLDMLRTGADQARESLCYKYGLDLQALPWDKMSSNSTFIAQHLMSLGFGESATHVRYRPKRKASERTILKYDSRFAAEEKIKLTDETRRAWNEAIWECQRASQEFRCLSVRKLQLARAAVNWTLTQAKQRSRCPRVVVVVEDLNVRFMHGGGKRQEGWAGFFKARSEKRWFIQALHKAYTELPTNRGIHVMEVNPARTSITCTKCGYCDPENRYGEDFHCRNPKCKVRGGHVANADLDIATENLARVALSGPMPKAPKLK

SEQ ID NO: 35 - protein, 848 aa, synthetic construct
MTPSFGYQMIIVTPIHHASGAWATLRLLFLNPKTSGVMLGMTKTKSAFALMREEVFPGLLFKSADLKMAGRKFAKEGREAAIEYLRGKDEERPANFKPPAKGDIIAQSRPFDQWPIVQVSQAIQKYIFGLTKAEFDATKTLLYGEGNHPTTESRRRWFEATGVPDFGFTSAQGLNAIFSSALARYEGVIQKVENRNEKRLKKLSEKNQRLVEEGHAVEAYVPETAFHTLESLKALSEKSLVPLDDLMDKIDRLAQPPGINPCLYGYQQVAPYIYDPENPRGVVLPDLYLGYCRKPDDPITACPNRLDIPKGQPGYIPEHQRGQLKKHGRVRRFRYTNPQAKARAKAQTAILAVLRIDEDWVVMDLRGLLRNVYFREVAAPGELTARTLLDTFTGCPVLNLRSNVVTFCYDIESKGALHAEYVRKGWATRNKLLDLTKDGQSVALLSVDLGQRHPVAVMISRLKRDDKGDLSEKSIQVVSRTFADQYVDKLKRYRVQYDALRKEIYDAALVSLPPEQQAEIRAYEAFAPGDAKANVLSVMFQGEVSPDELPWDKMNTNTHYISDLYLRRGGDPSRVFFVPQPSTPKKNAKKPPAPRKPVKRTDENVSHMPEFRPHLSNETREAFQKAKWTMERGNVRYAQLSRFLNQIVREANNWLVSEAKKLTQCQTVVWAIEDLHVPFFHGKGKYHETWDGFFRQKKEDRWFVNVFHKAISERAPNKGEYVMEVAPYRTSQRCPVCGFVDADNRHGDHFKCLRCGVELHADLEVATWNIALVAVQGHGIAGPPREQSCGGETAGTARKGKNIKKNKGLADAVTVEAQDSEGGSKKDAGTARNPVYIPSESQVNCPAP

SEQ ID NO: 36 - protein, 781 aa, synthetic construct
MKPKTPKPPKTPVAALIDKHFPGKRFRASYLKSVGKKLKNQGEDVAVRFLTGKDEERPPNFQPPAKSNIVAQSRPIEEWPIHKVSVAVQEYVYGLTVAEKEACSDAGESSSSHAAWFAKTGVENFGYTSVQGLNKIFPPTFNRFDGVIKKVENRNEKKRQKATRINEAKRNKGQSEDPPEAEVKATDDAGYLLQPPGINHSVYGYQSITLCPYTAEKFPTIKLPEEYAGYHSNPDAPIPAGVPDRLAIPEGQPGHVPEEHRAGLSTKKHRRVRQWYAMANWKPKPKRTSKPDYDRLAKARAQGALLIVIRIDEDWVVVDARGLLRNVRWRSLGKREITPNELLDLFTGDPVLDLKRGVVTFTYAEGVVNVCSRSTTKGKQTKVLLDAMTAPRDGKKRQIGMVAVDLGQTNPIAAEYSRVGKNAAGTLEATPLSRSTLPDELLREIALYRKAHDRLEAQLREEAVLKLTAEQQAENARYVETSEEGAKLALANLGVDTSTLPWDAMTGWSTCISDHLINHGGDTSAVFFQTIRKGTKKLETIKRKDSSWADIVRPRLTKETREALNDFLWELKRSHEGYEKLSKRLEELARRAVNHVVQEVKWLTQCQDIVIVIEDLNVRNFHGGGKRGGGWSNFFTVKKENRWFMQALHKAFSDLAAHRGIPVLEVYPARTSITCLGCGHCDPENRDGEAFVCQQCGATFHADLEVATRNIARVALTGEAMPKAPAREQPGGAKKRGTSRRRKLTEVAVKSAEPTIHQAKNQQLNGTSRDPVYKGSELPAL

SEQ ID NO: 37 - protein, 767 aa, synthetic construct
MSEITDLLKANFKGKTFKSADMRMAGRILKKSGAQAVIKYLSDKGAVDPPDFRPPAKCNIIAQSRPFDEWPICKASMAIQQHIYGLTKNEFDESSPGTSSASHEQWFAKTGVDTHGFTHVQGLNLIFQHAKKRYEGVIKKVENYNEKERKKFEGINERRSKEGMPLLEPRLRTAFGDDGKFAEKPGVNPSIYLYQQTSPRPYDKTKHPYVHAPFELKEITTIPTQDDRLKIPFGAPGHVPEKHRSQLSMAKHKRRRAWYALSQNKPRPPKDGSKGRRSVRDLADLKAASLADAIPLVSRVGFDWVVIDGRGLLRNLRWRKLAHEGMTVEEMLGFFSGDPVIDPRRNVATFIYKAEHATVKSRKPIGGAKRAREELLKATASSDGVIRQVGLISVDLGQTNPVAYEISRMHQANGELVAEHLEYGLLNDEQVNSIQRYRAAWDSMNESFRQKAIESLSMEAQDEIMQASTGAAKRTREAVLTMFGPNATLPWSRMSSNTTCISDALIEVGKEEETNFVTSNGPRKRTDAQWAAYLRPRVNPETRALLNQAVWDLMKRSDEYERLSKRKLEMARQCVNFVVARAEKLTQCNNIGIVLENLVVRNFHGSGRRESGWEGFFEPKRENRWFMQVLHKAFSDLAQHRGVMVFEVHPAYSSQTCPACRYVDPKNRSSEDRERFKCLKCGRSFNADREVATFNIREIARTGVGLPKPDCERSRGVQTTGTARNPGRSLKSNKNPSEPKRVLQSKTRKKITSTETQNEPLATDLKT

SEQ ID NO: 38 - protein, 760 aa, synthetic construct
MTPKTESPLSALCKKHFPGKRFRTNYLKDAGKILKKHGEDAVVAFLSDKQEDEPANFCPPAKVHILAQSRPFEDWPINLASKAIQTYVYGLTADERKTCEPGTSKESHDRWFKETGVDHHGFTSVQGLNLIFKHTLNRYDGVIKKVETRNEKRRSSVVRINEKKAAEGLPLIAAEAEETAFGEDGRLLQPPGVNHSIYCFQQVSPQPYSSKKHPQVVLPHAVQGVDPDAPIPVGRPNRLDIPKGQPGYVPEWQRPHLSMKCKRVRMWYARANWRRKPGRRSVLNEARLKEASAKGALPIVLVIGDDWLVMDARGLLRSVFWRRVAKPGLSLSELLNVTPTGLFSGDPVIDPKRGLVTFTSKLGVVAVHSRKPTRGKKSKDLLLKMTKPTDDGMPRHVGMVAIDLGQTNPVAAEYSRVVQSDAGTLKQEPVSRGVLPDDLLKDVARYRRAYDLTEESIRQEAIALLSEGHRAEVTKLDQTTANETKRLLVDRGVSESLPWEKMSSNTTYISDCLVALGKTDDVFFVPKAKKGKKETGIAVKRKDHGWSKLLRPRTSPEARKALNENQWAVKRASPEYERLSRRKLELGRRCVNHIIQETKRWTQCEDIVVVLEDLNVGFFHGSGKRPDGWDNFFVSKRENRWFIQVLHKAFGDLATHRGTHVIEVHPARTSITCIKCGHCDAGNRDGESFVCLASACGDRRHADLEVATRNVARVAITGERMPPSEQARDVQKAGGARKRKPSARNVKSSYPAVEPAPASP

SEQ ID NO: 39 - protein, 752 aa, synthetic construct
MSDNKMKKLSKEEKPLTPLQILIRKYIDKSQYPSGFKTTIIKQAGVRIKSVKSEQDEINLANWIISKYDPTYIKRDFNPSAKCQIIATSRSVADFDIVKMSNKVQEIFFASSHLDKNVFDIGKSKSDHDSWFERNNVDRGIYTYSNVQGMNLIFSNTKNTYLGVAVKAQNKFSSKMKRIQDINNFRITNHQSPLPIPDEIKIYDDAGFLLNPPGVNPNIFGYQSCLLKPLENKEIISKTSFPEYSRLPADMIEVNYKISNRLKFSNDQKGFIQFKDKLNLFKINSQELFSKRRRLSGQPILLVASFGDDWVVLDGRGLLRQVYYRGIAKPGSITISELLGFFTGDPIVDPIRGVVSLGFKPGVLSQETLKTTSARIFAEKLPNLVLNNNVGLMSIDLGQTNPVSYRLSEITSNMSVEHICSDFLSQDQISSIEKAKTSLDNLEEEIAIKAVDHLSDEDKINFANFSKLNLPEDTRQSLFEKYPELIGSKLDFGSMGSGTSYIADELIKFENKDAFYPSGKKKFDLSFSRDLRKKLSDETRKSYNDALFLEKRTNDKYLKNAKRRKQIVRTVANSLVSKIEELGLTPVINIENLAMSGGFFDGRGKREKGWDNFFKVKKENRWVMKDFHKAFSELSPHHGVIVIESPPYCTSVTCTKCNFCDKKNRNGHKFTCQRCGLDANADLDIATENLEKVAISGKRMPGSERSSDERKVAVARKAKSPKGKAIKGVKCTITDEPALLSANSQDCSQSTS

SEQ ID NO: 40 - protein, 747 aa, synthetic construct
MALSLAEVRERHFKGLRFRSSYLKRAGKILKKEGEAACVAYLTGKDEESPPNFKPPAKCDVVAQSRPFEEWPIVQASVAVQSYVYGLTKEAFEAFNPGTTKQSHEACLAATGIDTCGYSNVQGLNLIFRQAKNRYEGVITKVENRNKKAKKKLTRKNEWRQKNGHSELPEAPEELTFNDEGRLLQPPGINPSLYTYQQISPTPWSPKDSSILPPQYAGYERDPNAPIPFGVAKDRLTIASGCPGYIPEWMRTAGEKTNPRTQKKFMHPGLSTRKNKRMRLPRSVRSAPLGALLVTIHLGEDWLVLDVRGLLRNARWRGVAPKDISTQGLLNLFTGDPVIDTRRGVVTFTYKPETVGIHSRTWLYKGKQTKEVLEKLTQDQTVALVAIDLGQTNPVSAAASRVSRSGENLSIETVDRFFLPDELIKELRLYRMAHDRLEERIREESTLALTEAQQAEVRALEHVVRDDAKNKVCAAFNLDAASLPWDQMTSNTTYLSEAILAQGVSRDQVFFTPNPKKGSKEPVEVMRKDRAWVYAFKAKLSEETRKAKNEALWALKRASPDYARLSKRREELCRRSVNMVINRAKKRTQCQVVIPVLEDLNIGFFHGSGKRLPGWDNFFVAKKENRWLMNGLHKSFSDLAVHRGFYVFEVMPHRTSITCPACGHCDSENRDGEAFVCLSCKRTYHADLDVATHNLTQVAGTGLPMPEREHPGGTKKPGGSRKPESPQTHAPILHRTDYSESADRLGS

SEQ ID NO: 41 - protein, 733 aa, synthetic construct
QAVIKYLSDKGAVDPPDFRPPAKCNIIAQSRPFDEWPICKASMAIQQHIYGLTKNEFDESSPGTSSASHEQWFAKTGVDTHGFTHVQGLNLIFQHAKKRYEGVIKKVENYNEKERKKFEGINERRSKEGMPLLEPRLRTAFGDDGKFAEKPGVNPSIYLYQQTSPRPYDKTKHPYVHAPFELKEITTIPTQDDRLKIPFGAPGHVPEKHRSQLSMAKHKRRRAWYALSQNKPRPPKDGSKGRRSVRDLADLKAASLADAIPLVSRVGFDWVVIDGRGLLRNLRWRKLAHEGMTVEEMLGFFSGDPVIDPRRNVATFIYKAEHATVKSRKPIGGAKRAREELLKATASSDGVIRQVGLISVDLGQTNPVAYEISRMHQANGELVAEHLEYGLLNDEQVNSIQRYRAAWDSMNESFRQKAIESLSMEAQDEIMQASTGAAKRTREAVLTMFGPNATLPWSRMSSNTTCISDALIEVGKEEETNFVTSNGPRKRTDAQWAAYLRPRVNPETRALLNQAVWDLMKRSDEYERLSKRKLEMARQCVNFVVARAEKLTQCNNIGIVLENLVVRNFHGSGRRESGWEGFFEPKRENRWFMQVLHKAFSDLAQHRGVMVFEVHPAYSSQTCPACRYVDPKNRSSEDRERFKCLKCGRSFNADREVATFNIREIARTGVGLPKPDCERSRDVQTPGTARKSGRSLKSQDNLSEPKRVLQSKTRKKITSTETQNEPLATDLKT

SEQ ID NO: 42 - protein, 702 aa, synthetic construct
MIKEQSELSKLIEKYYPGKKFYSNDLKQAGKHLKKSEHLTAKESEELTVEFLKSCKEKLYDFRPPAKALIISTSRPFEEWPIYKASESIQKYIYSLTKEELEKYNISTDKTSQENFFKESLIDNYGFANVSGLNLIFQHTKAIYDGVLKKVNNRNNKILKKYKRKIEEGIEIDSPELEKAIDESGHFINPPGINKNIYCYQQVSPTIFNSFKETKIICPFNYKRNPNDIIQKGVIDRLAIPFGEPGYIPDHQRDKVNKHKKRIRKYYKNNENKNKDAILAKINIGEDWVLFDLRGLLRNAYWRKLIPKQGITPQQLLDMFSGDPVIDPIKNNITFIYKESIIPIHSESIIKTKKSKELLEKLTKDEQIALVSIDLGQTNPVAARFSRLSSDLKPEHVSSSFLPDELKNEICRYREKSDLLEIEIKNKAIKMLSQEQQDEIKLVNDISSEELKNSVCKKYNIDNSKIPWDKMNGFTTFIADEFINNGGDKSLVYFTAKDKKSKKEKLVKLSDKKIANSFKPKISKETREILNKITWDEKISSNEYKKLSKRKLEFARRATNYLINQAKKATRLNNVVLVVEDLNSKFFHGSGKREDGWDNFFIPKKENRWFIQALHKSLTDVSIHRGINVIEVRPERTSITCPKCGCCDKENRKGEDFKCIKCDSVYHADLEVATFNIEKVAITGESMPKPDCERLGGEESIG

SEQ ID NO: 43 - protein, 661 aa, synthetic construct
VAFLDGKEVDEPYTLQPPAKCHILAVSRPIEEWPIARVTMAVQEHVYALPVHEVEKSRPETTEGSRSAWFKNSGVSNHGVTHAQTLNAILKNAYNVYNGVIKKVENRNAKKRDSLAAKNKSRERKGLPHFKADPPELATDEQGYLLQPPSPNSSVYLVQQHLRTPQIDLPSGYTGPVVDPRSPIPSLIPIDRLAIPPGQPGYVPLHDREKLTSNKHRRMKLPKSLRAQGALPVCFRVFDDWAVVDGRGLLRHAQYRRLAPKNVSIAELLELYTGDPVIDIKRNLMTFRFAEAVVEVTARKIVEKYHNKYLLKLTEPKGKPVREIGLVSIDLNVQRLIALAIYRVHQTGESQLALSPCLHREILPAKGLGDFDKYKSKFNQLTEEILTAAVQTLTSAQQEEYQRYVEESSHEAKADLCLKYSITPHELAWDKMTSSTQYISRWLRDHGWNASDFTQITKGRKKVERLWSDSRWAQELKPKLSNETRRKLEDAKHDLQRANPEWQRLAKRKQEYSRHLANTVLSMAREYTACETVVIAIENLPMKGGFVDGNGSRESGWDNFFTHKKENRWMIKDIHKALSDLAPNRGVHVLEVNPQYTSQTCPECGHRDKANRDPIQRERFCCTHCGAQRHADLEVATHNIAMVATTGKSLTGKSLAPQRLQ

SEQ ID NO: 44 - protein, 531 aa, synthetic construct
LEIPEGEPGHVPWFQRMDIPEGQIGHVNKIQRFNFVHGKNSGKVKFSDKTGRVKRYHHSKYKDATKPYKFLEESKKVSALDSILAIITIGDDWVVFDIRGLYRNVFYRELAQKGLTAVQLLDLFTGDPVIDPKKGIITFSYKEGVVPVFSQKIVSRFKSRDTLEKLTSQGPVALLSVDLGQNEPVAARVCSLKNINDKIALDNSCRIPFLDDYKKQIKDYRDSLDELEIKIRLEAINSLDVNQQVEIRDLDVFSADRAKASTVDMFDIDPNLISWDSMSDARFSTQISDLYLKNGGDESRVYFEINNKRIKRSDYNISQLVRPKLSDSTRKNLNDSIWKLKRTSEEYLKLSKRKLELSRAVVNYTIRQSKLLSGINDIVIILEDLDVKKKFNGRGIRDIGWDNFFSSRKENRWFIPAFHKSFSELSSNRGLCVIEVNPAWTSATCPDCGFCSKENRDGINFTCRKCGVSYHADIDVATLNIARVAVLGKPMSGPADRERLGGTKKPRVARSRKDMKRKDISNGTVEVMVTA

SEQ ID NO: 45 - protein, 479 aa, synthetic construct
IPSFGYLDRLKIAKGQPGYIPEWQRETINPSKKVRRYWATNHEKIRNAIPLVVFIGDDWVIIDGRGLLRDARRRKLADKNTTIEQLLEMVSNDPVIDSTRGIATLSYVEGVVPVRSFIPIGEKKGREYLEKSTQKESVTLLSVDIGQINPVSCGVYKVSNGCSKIDFLDKFFLDKKHLDAIQKYRTLQDSLEASIVNEALDEIDPSFKKEYQNINSQTSNDVKKSLCTEYNIDPEAISWQDITAHSTLISDYLIDNNITNDVYRTVNKAKYKTNDFGWYKKFSAKLSKEAREALNEKIWELKIASSKYKKLSVRKKEIARTIANDCVKRAETYGDNVVVAMESLTKNNKVMSGRGKRDPGWHNLGQAKVENRWFIQAISSAFEDKATHHGTPVLKVNPAYTSQTCPSCGHCSKDNRSSKDRTIFVCKSCGEKFNADLDVATYNIAHVAFSGKKLSPPSEKSSATKKPRSARKSKKSRKS

SEQ ID NO: 46 - protein, 452 aa, synthetic construct
SPIEKLLNGLLVKITFGNDWIICDARGLLDNVQKGIIHKSYFTNKSSLVDLIDLFTCNPIVNYKNNVVTFCYKEGVVDVKSFTPIKSGPKTQENLIKKLKYSRFQNEKDACVLGVGVDVGVTNPFAINGFKMPVDESSEWVMLNEPLFTIETSQAFREEIMAYQQRTDEMNDQFNQQSIDLLPPEYKVEFDNLPEDINEVAKYNLLHTLNIPNNFLWDKMSNTTQFISDYLIQIGRGTETEKTITTKKGKEKILTIRDVNWFNTFKPKISEETGKARTEIKRDLQKNSDQFQKLAKSREQSCRTWVNNVTEEAKIKSGCPLIIFVIEALVKDNRVFSGKGHRAIGWHNFGKQKNERRWWVQAIHKAFQEQGVNHGYPVILCPPQYTSQTCPKCNHVDRDNRSGEKFKCLKYGWIGNADLDVGAYNIARVAITGKALSKPLEQKKIKKAKNKT

SEQ ID NO: 47 - protein, 425 aa, synthetic construct
LLDNVQKGIIHKSYFTNKSSLVDLIDLFTCNPIVNYKNNVVTFCYKEGVVDVKSFTPIKSGPKTQENLIKKLKYSRFQNEKDACVLGVGVDVGVTNPFAINGFKMPVDESSEWVMLNEPLFTIETSQAFREEIMAYQQRTDEMNDQFNQQSIDLLPPEYKVEFDNLPEDINEVAKYNLLHTLNIPNNFLWDKMSNTTQFISDYLIQIGRGTETEKTITTKKGKEKILTIRDVNWFNTFKPKISEETGKARTEIKRDLQKNSDQFQKLAKSREQSCRTWVNNVTEEAKIKSGCPLIIFVIEALVKDNRVFSGKGHRAIGWHNFGKQKNERRWWVQAIHKAFQEQGVNHGYPVILCPPQYTSQTCPKCNHVDRDNRSGEKFKCLKYGWIGNADLDVGAYNIARVAITGKALSKPLEQKKIKKAKNKT

SEQ ID NO: 48 - DNA, 36 bp, synthetic construct
  source 1..36: mol_type = other DNA
ggagagatctcaaacgattgctcgattagtcgagac

SEQ ID NO: 49 - DNA, 36 bp, synthetic construct
  source 1..36: mol_type = other DNA
gtcggaacgctcaacgattgcccctcacgaggggac

SEQ ID NO: 50 - DNA, 36 bp, synthetic construct
  source 1..36: mol_type = other DNA
accaaaacgactattgattgcccagtacgctgggac

SEQ ID NO: 51 - DNA, 37 bp, synthetic construct
  source 1..37: mol_type = other DNA
ggatccaatcctttttgattgcccaattcgttgggac

SEQ ID NO: 52 - DNA, 36 bp, synthetic construct
  source 1..36: mol_type = other DNA
ggatctgaggatcattattgctcgttacgacgagac

SEQ ID NO: 53 - DNA, 36 bp, synthetic construct
  source 1..36: mol_type = other DNA
cctgcgaaaccttttgattgctcagtacgctgagac

SEQ ID NO: 54 - DNA, 36 bp, synthetic construct
  source 1..36: mol_type = other DNA
ctttcaagactaatagattgctccttacgaggagac

SEQ ID NO: 55 - DNA, 36 bp, synthetic construct
  source 1..36: mol_type = other DNA
gtagaagacctcgctgattgctcggtgcgccgagac

SEQ ID NO: 56 - DNA, 36 bp, synthetic construct
  source 1..36: mol_type = other DNA
atggcaacagactctcattgcgcggtacgccgcgac

SEQ ID NO: 57 - DNA, 36 bp, synthetic construct; identical to SEQ ID NO: 50
  source 1..36: mol_type = other DNA

SEQ ID NO: 58 - DNA, 34 bp, synthetic construct
  source 1..34: mol_type = other DNA
gtcgctctctaacgcttgcccagtacgctgggac

SEQ ID NO: 59 - DNA, 36 bp, synthetic construct
  source 1..36: mol_type = other DNA
gctggaagactcaatgatggctccttacgaggagac

SEQ ID NO: 60 - DNA, 37 bp, synthetic construct
  source 1..37: mol_type = other DNA
ggttgaaccctcaacagattgctcggtaagccgagac

SEQ ID NO: 61 - DNA, 37 bp, synthetic construct; identical to SEQ ID NO: 60
  source 1..37: mol_type = other DNA

SEQ ID NO: 62 - DNA, 36 bp, synthetic construct
  source 1..36: mol_type = other DNA
cttgaaatcctgtcagattgctcccttcggggagac

SEQ ID NO: 63 - DNA, 36 bp, synthetic construct; identical to SEQ ID NO: 59
  source 1..36: mol_type = other DNA

SEQ ID NO: 64 - DNA, 36 bp, synthetic construct; identical to SEQ ID NO: 59
  source 1..36: mol_type = other DNA

SEQ ID NO: 65 - DNA, 36 bp, synthetic construct
  source 1..36: mol_type = other DNA
ctaggaacgcacgcagattgctcggtacgccgagac

SEQ ID NO: 66 - DNA, 36 bp, synthetic construct
  source 1..36: mol_type = other DNA
attgcaacgcctaaagattgctcgatacgtcgagac

SEQ ID NO: 67 - DNA, 36 bp, synthetic construct
  source 1..36: mol_type = other DNA
gttcggcraycctttgattgctcagtacgctgagac

SEQ ID NO: 68 - DNA, 36 bp, synthetic construct
  source 1..36: mol_type = other DNA
gttgaacctagatcagatggctcagtacgctgagac

SEQ ID NO: 69 - DNA, 36 bp, synthetic construct
  source 1..36: mol_type = other DNA
ccctcaacacgtcagaaatgcccggcacgccgggac

SEQ ID NO: 70 - DNA, 36 bp, synthetic construct
  source 1..36: mol_type = other DNA
gtcgcaagactcgaataattgcccctctatggggac

SEQ ID NO: 71 - DNA, 37 bp, synthetic construct
  source 1..37: mol_type = other DNA
gctggggaccgatcctgattgctcgctgcggcgagac

SEQ ID NO: 72 - DNA, 36 bp, synthetic construct
  source 1..36: mol_type = other DNA
ctctcaatggataacgattgctctctacggagagac

SEQ ID NO: 73 - DNA, 36 bp, synthetic construct; identical to SEQ ID NO: 59
  source 1..36: mol_type = other DNA

SEQ ID NO: 74 - DNA, 36 bp, synthetic construct
  source 1..36: mol_type = other DNA
gttgaaccctcaacagattgctcggtaagccgagac

SEQ ID NO: 75 - DNA, 36 bp, synthetic construct; identical to SEQ ID NO: 70
  source 1..36: mol_type = other DNA

SEQ ID NO: 76 - DNA, 36 bp, synthetic construct; identical to SEQ ID NO: 49
  source 1..36: mol_type = other DNA

SEQ ID NO: 77 - DNA, 36 bp, synthetic construct; identical to SEQ ID NO: 68
  source 1..36: mol_type = other DNA

SEQ ID NO: 78 - DNA, 36 bp, synthetic construct; identical to SEQ ID NO: 72
  source 1..36: mol_type = other DNA

SEQ ID NO: 79 - DNA, 36 bp, synthetic construct
  source 1..36: mol_type = other DNA
actgaaaccaccaacgattgcgctcctcggagcgac

SEQ ID NO: 80 - DNA, 36 bp, synthetic construct; identical to SEQ ID NO: 50
  source 1..36: mol_type = other DNA

SEQ ID NO: 81 - DNA, 36 bp, synthetic construct; identical to SEQ ID NO: 68
  source 1..36: mol_type = other DNA

SEQ ID NO: 82 - DNA, 36 bp, synthetic construct; identical to SEQ ID NO: 74
  source 1..36: mol_type = other DNA

SEQ ID NO: 83 - DNA, 36 bp, synthetic construct; identical to SEQ ID NO: 68
  source 1..36: mol_type = other DNA

SEQ ID NO: 84 - DNA, 36 bp, synthetic construct; identical to SEQ ID NO: 49
  source 1..36: mol_type = other DNA

SEQ ID NO: 85 - DNA, 37 bp, synthetic construct; identical to SEQ ID NO: 60
  source 1..37: mol_type = other DNA

SEQ ID NO: 86 - DNA, 37 bp, synthetic construct; identical to SEQ ID NO: 60
  source 1..37: mol_type = other DNA

SEQ ID NO: 87-97 - skipped (11 entries)

SEQ ID NO: 98 - DNA, 10 bp, synthetic construct
  source 1..10: mol_type = other DNA
tttttttttt

SEQ ID NO: 99 - DNA, 12 bp, synthetic construct
  source 1..12: mol_type = other DNA
tttttttttttt

SEQ ID NO: 100 - DNA, 14 bp, synthetic construct
  source 1..14: mol_type = other DNA
tttttttttttttt

SEQ ID NO: 101-104 - skipped (4 entries)

SEQ ID NO: 105 - protein, 735 aa, synthetic construct
MIKPTVSQFLTPGFKLIRNHSRTAGLKLKNEGEEACKKFVRENEIPKDECPNFQGGPAIANIIAKSREFTEWEIYQSSLAIQEVIFTLPKDKLPEPILKEEWRAQWLSEHGLDTVPYKEAAGLNLIIKNAVNTYKGVQVKVDNKNKNNLAKINRKNEIAKLNGEQEISFEEIKAFDDKGYLLQKPSPNKSIYCYQSVSPKPFITSKYHNVNLPEEYIGYYRKSNEPIVSPYQFDRLRIPIGEPGYVPKWQYTFLSKKENKRRKLSKRIKNVSPILGIICIKKDWCVFDMRGLLRTNHWKKYHKPTDSINDLFDYFTGDPVIDTKANVVRFRYKMENGIVNYKPVREKKGKELLENICDQNGSCKLATVDVGQNNPVAIGLFELKKVNGELTKTLISRHPTPIDFCNKITAYRERYDKLESSIKLDAIKQLTSEQKIEVDNYNNNFTPQNTKQIVCSKLNINPNDLPWDKMISGTHFISEKAQVSNKSEIYFTSTDKGKTKDVMKSDYKWFQDYKPKLSKEVRDALSDIEWRLRRESLEFNKLSKSREQDARQLANWISSMCDVIGIENLVKKNNFFGGSGKREPGWDNFYKPKKENRWWINAIHKALTELSQNKGKRVILLPAMRTSITCPKCKYCDSKNRNGEKFNCLKCGIELNADIDVATENLATVAITAQSMPKPTCERSGDAKKPVRARKAKAPEFHDKLAPSYTVVLREAVKRPAATKKAGQAKKKKEF

SEQ ID NO: 106 - protein, 18 aa, synthetic construct
KRPAATKKAGQAKKKKEF

SEQ ID NO: 107 - protein, 753 aa, synthetic construct
SNAPKKKRKVGIHGVPAAMIKPTVSQFLTPGFKLIRNHSRTAGLKLKNEGEEACKKFVRENEIPKDECPNFQGGPAIANIIAKSREFTEWEIYQSSLAIQEVIFTLPKDKLPEPILKEEWRAQWLSEHGLDTVPYKEAAGLNLIIKNAVNTYKGVQVKVDNKNKNNLAKINRKNEIAKLNGEQEISFEEIKAFDDKGYLLQKPSPNKSIYCYQSVSPKPFITSKYHNVNLPEEYIGYYRKSNEPIVSPYQFDRLRIPIGEPGYVPKWQYTFLSKKENKRRKLSKRIKNVSPILGIICIKKDWCVFDMRGLLRTNHWKKYHKPTDSINDLFDYFTGDPVIDTKANVVRFRYKMENGIVNYKPVREKKGKELLENICDQNGSCKLATVDVGQNNPVAIGLFELKKVNGELTKTLISRHPTPIDFCNKITAYRERYDKLESSIKLDAIKQLTSEQKIEVDNYNNNFTPQNTKQIVCSKLNINPNDLPWDKMISGTHFISEKAQVSNKSEIYFTSTDKGKTKDVMKSDYKWFQDYKPKLSKEVRDALSDIEWRLRRESLEFNKLSKSREQDARQLANWISSMCDVIGIENLVKKNNFFGGSGKREPGWDNFYKPKKENRWWINAIHKALTELSQNKGKRVILLPAMRTSITCPKCKYCDSKNRNGEKFNCLKCGIELNADIDVATENLATVAITAQSMPKPTCERSGDAKKPVRARKAKAPEFHDKLAPSYTVVLREAVKRPAATKKAGQAKKKKEF

SEQ ID NO: 108 - DNA, 30 bp, synthetic construct
  source 1..30: mol_type = other DNA
tattaaatactcgtattgctgttcgattat

SEQ ID NO: 109 - DNA, 30 bp, synthetic construct
  source 1..30: mol_type = other DNA
cacagcttgtctgtaagcggatgccatatg

SEQ ID NO: 110 - protein, 7 aa, Macaca mulatta
PKKKRKV

SEQ ID NO: 111 - protein, 9 aa, unidentified
PAAKRVKLD

SEQ ID NO: 112 - protein, 15 aa, Macaca mulatta
PKKKRKVGIHGVPAA

SEQ ID NO: 113 - protein, 10 aa, synthetic construct
MISKMIKPTV

SEQ ID NO: 114 - protein, 10 aa, synthetic construct
MISKMIKPTV

SEQ ID NO: 115 - protein, 4 aa, synthetic construct
MISK

SEQ ID NO: 116 - DNA, 30 bp, synthetic construct; identical to SEQ ID NO: 108
  source 1..30: mol_type = other DNA

SEQ ID NO: 117 - DNA, 30 bp, synthetic construct; identical to SEQ ID NO: 109
  source 1..30: mol_type = other DNA

SEQ ID NO: 118 - DNA, 20 bp, synthetic construct
  source 1..20: mol_type = other DNA
tggatatctgtgggacaaga

SEQ ID NO: 119 - DNA, 20 bp, synthetic construct
  source 1..20: mol_type = other DNA
tcccacagatatccagaacc

SEQ ID NO: 120 - DNA, 20 bp, synthetic construct
  source 1..20: mol_type = other DNA
gagtctctcagctggtacac

SEQ ID NO: 121 - DNA, 20 bp, synthetic construct
  source 1..20: mol_type = other DNA
agagtctctcagctggtaca

SEQ ID NO: 122 - DNA, 20 bp, synthetic construct
  source 1..20: mol_type = other DNA
tcactggatttagagtctct

SEQ ID NO: 123 - DNA, 20 bp, synthetic construct
  source 1..20: mol_type = other DNA
agaatcaaaatcggtgaata

SEQ ID NO: 124 - DNA, 20 bp, synthetic construct
  source 1..20: mol_type = other DNA
gagaatcaaaatcggtgaat

SEQ ID NO: 125 - DNA, 20 bp, synthetic construct
  source 1..20: mol_type = other DNA
accgattttgattctcaaac

SEQ ID NO: 126 - DNA, 20 bp, synthetic construct
  source 1..20: mol_type = other DNA
tttgagaatcaaaatcggtg

SEQ ID NO: 127 - DNA, 20 bp, synthetic construct
  source 1..20: mol_type = other DNA
gtttgagaatcaaaatcggt

SEQ ID NO: 128 - DNA, 20 bp, synthetic construct
  source 1..20: mol_type = other DNA
tgattctcaaacaaatgtgt

SEQ ID NO: 129 - DNA, 20 bp, synthetic construct
  source 1..20: mol_type = other DNA
gattctcaaacaaatgtgtc

SEQ ID NO: 130 - DNA, 20 bp, synthetic construct
  source 1..20: mol_type = other DNA
attctcaaacaaatgtgtca

SEQ ID NO: 131 - DNA, 20 bp, synthetic construct
  source 1..20: mol_type = other DNA
tgacacatttgtttgagaat

SEQ ID NO: 132 - DNA, 20 bp, synthetic construct
  source 1..20: mol_type = other DNA
tcaaacaaatgtgtcacaaa

SEQ ID NO: 133 - DNA, 20 bp, synthetic construct
  source 1..20: mol_type = other DNA
gtgacacatttgtttgagaa

SEQ ID NO: 134 - DNA, 20 bp, synthetic construct
  source 1..20: mol_type = other DNA
ctttgtgacacatttgtttg

SEQ ID NO: 135 - DNA, 20 bp, synthetic construct
  source 1..20: mol_type = other DNA
tgatgtgtatatcacagaca

SEQ ID NO: 136 - DNA, 20 bp, synthetic construct
  source 1..20: mol_type = other DNA
tctgtgatatacacatcaga

SEQ ID NO: 137 - DNA, 20 bp, synthetic construct
  source 1..20: mol_type = other DNA
gtctgtgatatacacatcag

SEQ ID NO: 138 - DNA, 20 bp, synthetic construct
  source 1..20: mol_type = other DNA
tgtctgtgatatacacatca

SEQ ID NO: 139 - DNA, 20 bp, synthetic construct
  source 1..20: mol_type = other DNA
aagtccatagacctcatgtc

SEQ ID NO: 140 - DNA, 20 bp, synthetic construct
  source 1..20: mol_type = other DNA
ctcttgaagtccatagacct

SEQ ID NO: 141 - DNA, 20 bp, synthetic construct
  source 1..20: mol_type = other DNA
aagagcaacagtgctgtggc

SEQ ID NO: 142 - DNA, 20 bp, synthetic construct
  source 1..20: mol_type = other DNA
ctccaggccacagcactgtt

SEQ ID NO: 143 - DNA, 20 bp, synthetic construct
  source 1..20: mol_type = other DNA
ttgctccaggccacagcact

SEQ ID NO: 144 - DNA, 20 bp, synthetic construct
  source 1..20: mol_type = other DNA
gttgctccaggccacagcac

SEQ ID NO: 145 - DNA, 20 bp, synthetic construct
  source 1..20: mol_type = other DNA
cacatgcaaagtcagatttg

SEQ ID NO: 146 - DNA, 20 bp, synthetic construct
  source 1..20: mol_type = other DNA
gcacatgcaaagtcagattt

SEQ ID NO: 147 - DNA, 20 bp, synthetic construct
  source 1..20: mol_type = other DNA
gcatgtgcaaacgccttcaa

SEQ ID NO: 148 - DNA, 20 bp, synthetic construct
  source 1..20: mol_type = other DNA
aaggcgtttgcacatgcaaa

SEQ ID NO: 149 - DNA, 20 bp, synthetic construct
  source 1..20: mol_type = other DNA
catgtgcaaacgccttcaac

SEQ ID NO: 150 - DNA, 20 bp, synthetic construct
  source 1..20: mol_type = other DNA
ttgaaggcgtttgcacatgc

SEQ ID NO: 151 - DNA, 20 bp, synthetic construct
  source 1..20: mol_type = other DNA
aacaacagcattattccaga

SEQ ID NO: 152 - DNA, 20 bp, synthetic construct
  source 1..20: mol_type = other DNA
tggaataatgctgttgttga

SEQ ID NO: 153 - DNA, 20 bp, synthetic construct
  source 1..20: mol_type = other DNA
ttccagaagacaccttcttc

SEQ ID NO: 154 - DNA, 20 bp, synthetic construct
  source 1..20: mol_type = other DNA
cagaagacaccttcttcccc

SEQ ID NO: 155 - DNA, 20 bp, synthetic construct
  source 1..20: mol_type = other DNA
cctgggctggggaagaaggt

SEQ ID NO: 156 - DNA, 20 bp, synthetic construct
  source 1..20: mol_type = other DNA
ttccccagcccaggtaaggg

SEQ ID NO: 157 - DNA, 20 bp, synthetic construct
  source 1..20: mol_type = other DNA
cccagcccaggtaagggcag

SEQ ID NO: 158 - DNA, 20 bp, synthetic construct
  source 1..20: mol_type = other DNA
taaaaggaaaaacagacatt

SEQ ID NO: 159 - DNA, 20 bp, synthetic construct
  source 1..20: mol_type = other DNA
ctaaaaggaaaaacagacat

SEQ ID NO: 160 - DNA, 20 bp, synthetic construct
  source 1..20: mol_type = other DNA
ttccttttagaaagttcctg

SEQ ID NO: 161 - DNA, 20 bp, synthetic construct
  source 1..20: mol_type = other DNA
tccttttagaaagttcctgt

SEQ ID NO: 162 - DNA, 20 bp, synthetic construct
  source 1..20: mol_type = other DNA
ccttttagaaagttcctgtg

SEQ ID NO: 163 - DNA, 20 bp, synthetic construct
  source 1..20: mol_type = other DNA
cttttagaaagttcctgtga

SEQ ID NO: 164 - DNA, 20 bp, synthetic construct
  source 1..20: mol_type = other DNA
tagaaagttcctgtgatgtc

SEQ ID NO: 165 - DNA, 20 bp, synthetic construct
  source 1..20: mol_type = other DNA
agaaagttcctgtgatgtca

SEQ ID NO: 166 - DNA, 20 bp, synthetic construct
  source 1..20: mol_type = other DNA
gaaagttcctgtgatgtcaa

SEQ ID NO: 167 - DNA, 20 bp, synthetic construct
  source 1..20: mol_type = other DNA
acatcacaggaactttctaa

SEQ ID NO: 168 - DNA, 20 bp, synthetic construct
  source 1..20: mol_type = other DNA
ctgtgatgtcaagctggtcg

SEQ ID NO: 169 - DNA, 20 bp, synthetic construct
  source 1..20: mol_type = other DNA
tcgaccagcttgacatcaca

SEQ ID NO: 170 - DNA, 20 bp, synthetic construct
  source 1..20: mol_type = other DNA
ctcgaccagcttgacatcac

SEQ ID NO: 171 - DNA, 20 bp, synthetic construct
  source 1..20: mol_type = other DNA
tctcgaccagcttgacatca

SEQ ID NO: 172 - DNA, 20 bp, synthetic construct
  source 1..20: mol_type = other DNA
aaagcttttctcgaccagct

SEQ ID NO: 173 - DNA, 20 bp, synthetic construct
  source 1..20: mol_type = other DNA
caaagcttttctcgaccagc

SEQ ID NO: 174 - DNA, 20 bp, synthetic construct
  source 1..20: mol_type = other DNA
cctgtttcaaagcttttctc

SEQ ID NO: 175 - DNA, 20 bp, synthetic construct
  source 1..20: mol_type = other DNA
gaaacaggtaagacaggggt

SEQ ID NO: 176 - DNA, 20 bp, synthetic construct
  source 1..20: mol_type = other DNA
aaacaggtaagacaggggtc

SEQ ID NO: 177 - DNA, 20 bp, synthetic construct
  source 1..20: mol_type = other DNA
aatataagtggaggcgtcgc

SEQ ID NO: 178 - DNA, 20 bp, synthetic construct
  source 1..20: mol_type = other DNA
atataagtggaggcgtcgcg

SEQ ID NO: 179 - DNA, 20 bp, synthetic construct
  source 1..20: mol_type = other DNA
aggaatgcccgccagcgcga

SEQ ID NO: 180 - DNA, 20 bp, synthetic construct
  source 1..20: mol_type = other DNA
ctgaagctgacagcattcgg

SEQ ID NO: 181 - DNA, 20 bp, synthetic construct
  source 1..20: mol_type = other DNA
gggccgagatgtctcgctcc

SEQ ID NO: 182 - DNA, 20 bp, synthetic construct
  source 1..20: mol_type = other DNA
gctgtgctcgcgctactctc

SEQ ID NO: 183 - DNA, 20 bp, synthetic construct
  source 1..20: mol_type = other DNA
ctggcctggaggctatccag

SEQ ID NO: 184 - DNA, 20 bp, synthetic construct
  source 1..20: mol_type = other DNA
tggcctggaggctatccagc

SEQ ID NO: 185 - DNA, 20 bp, synthetic construct
  source 1..20: mol_type = other DNA
atgtgtcttttcccgatatt

SEQ ID NO: 186 - DNA, 20 bp, synthetic construct
  source 1..20: mol_type = other DNA
tcccgatattcctcaggtac

SEQ ID NO: 187 - DNA, 20 bp, synthetic construct
  source 1..20: mol_type = other DNA
cccgatattcctcaggtact

SEQ ID NO: 188 - DNA, 20 bp, synthetic construct
  source 1..20: mol_type = other DNA
ccgatattcctcaggtactc

SEQ ID NO: 189 - DNA, 20 bp, synthetic construct
  source 1..20: mol_type = other DNA
gagtacctgaggaatatcgg

SEQ ID NO: 190 - DNA, 20 bp, synthetic construct
  source 1..20: mol_type = other DNA
ggagtacctgaggaatatcg

SEQ ID NO: 191 - DNA, 20 bp, synthetic construct
  source 1..20: mol_type = other DNA
ctcaggtactccaaagattc

SEQ ID NO: 192 - DNA, 20 bp, synthetic construct
  source 1..20: mol_type = other DNA
aggtttactcacgtcatcca

SEQ ID NO: 193 - DNA, 20 bp, synthetic construct
  source 1..20: mol_type = other DNA
actcacgtcatccagcagag

SEQ ID NO: 194 - DNA, 20 bp, synthetic construct
  source 1..20: mol_type = other DNA
ctcacgtcatccagcagaga

SEQ ID NO: 195 - DNA, 20 bp, synthetic construct
  source 1..20: mol_type = other DNA
tctgctggatgacgtgagta

SEQ ID NO: 196 - DNA, 20 bp, synthetic construct
  source 1..20: mol_type = other DNA
cattctctgctggatgacgt

SEQ ID NO: 197 - DNA, 20 bp, synthetic construct
  source 1..20: mol_type = other DNA
ccattctctgctggatgacg

SEQ ID NO: 198 - DNA, 20 bp, synthetic construct
  source 1..20: mol_type = other DNA
actttccattctctgctgga

SEQ ID NO: 199 - DNA, 20 bp, synthetic construct
  source 1..20: mol_type = other DNA
gactttccattctctgctgg

SEQ ID NO: 200 - DNA, 20 bp, synthetic construct
  source 1..20: mol_type = other DNA
aggaaatttgactttccatt

SEQ ID NO: 201 - DNA, 20 bp, synthetic construct
  source 1..20: mol_type = other DNA
cctgaattgctatgtgtctg

SEQ ID NO: 202 - DNA, 20 bp, synthetic construct
  source 1..20: mol_type = other DNA
ctgaattgctatgtgtctgg

SEQ ID NO: 203 - DNA, 20 bp, synthetic construct
  source 1..20: mol_type = other DNA
ctatgtgtctgggtttcatc

SEQ ID NO: 204 - DNA, 20 bp, synthetic construct
  source 1..20: mol_type = other DNA
aatgtcggatggatgaaacc

SEQ ID NO: 205 - DNA, 20 bp, synthetic construct
  source 1..20: mol_type = other DNA
catccatccgacattgaagt

SEQ ID NO: 206 - DNA, 20 bp, synthetic construct
  source 1..20: mol_type = other DNA
atccatccgacattgaagtt

SEQ ID NO: 207 - DNA, 20 bp, synthetic construct
  source 1..20: mol_type = other DNA
agtaagtcaacttcaatgtc

SEQ ID NO: 208 - DNA, 20 bp, synthetic construct
  source 1..20: mol_type = other DNA
ttcagtaagtcaacttcaat

SEQ ID NO: 209 - DNA, 20 bp, synthetic construct
  source 1..20: mol_type = other DNA
aagttgacttactgaagaat

SEQ ID NO: 210 - DNA, 20 bp, synthetic construct
  source 1..20: mol_type = other DNA
acttactgaagaatggagag

SEQ ID NO: 211 - DNA, 20 bp, synthetic construct
  source 1..20: mol_type = other DNA
tctctccattcttcagtaag

SEQ ID NO: 212 - DNA, 20 bp, synthetic construct
  source 1..20: mol_type = other DNA
ctgaagaatggagagagaat

SEQ ID NO: 213 - DNA, 20 bp, synthetic construct
  source 1..20: mol_type = other DNA
aattctctctccattcttca

SEQ ID NO: 214 - DNA, 20 bp, synthetic construct
  source 1..20: mol_type = other DNA
caattctctctccattcttc

SEQ ID NO: 215 - DNA, 20 bp, synthetic construct
  source 1..20: mol_type = other DNA
tcaattctctctccattctt

SEQ ID NO: 216 - DNA, 20 bp, synthetic construct
  source 1..20: mol_type = other DNA
ttcaattctctctccattct

SEQ ID NO: 217 - DNA, 20 bp, synthetic construct
  source 1..20: mol_type = other DNA
aaaaagtggagcattcagac

SEQ ID NO: 218 - DNA, 20 bp, synthetic construct
  source 1..20: mol_type = other DNA
ctgaaagacaagtctgaatg

SEQ ID NO: 219 - DNA, 20 bp, synthetic construct
  source 1..20: mol_type = other DNA
agacttgtctttcagcaagg

SEQ ID NO: 220 - DNA, 20 bp, synthetic construct
  source 1..20: mol_type = other DNA
tctttcagcaaggactggtc

SEQ ID NO: 221 - DNA, 20 bp, synthetic construct
  source 1..20: mol_type = other DNA
cagcaaggactggtctttct

SEQ ID NO: 222 - DNA, 20 bp, synthetic construct
  source 1..20: mol_type = other DNA
agcaaggactggtctttcta

SEQ ID NO: 223 - DNA, 20 bp, synthetic construct
  source 1..20: mol_type = other DNA
ctatctcttgtactacactg

SEQ ID NO: 224 - DNA, 20 bp, synthetic construct
  source 1..20: mol_type = other DNA
tatctcttgtactacactga

SEQ ID NO: 225 - DNA, 20 bp, synthetic construct
  source 1..20: mol_type = other DNA
agtgtagtacaagagataga

SEQ ID NO: 226 - DNA, 20 bp, synthetic construct
  source 1..20: mol_type = other DNA
tactacactgaattcacccc

SEQ ID NO: 227 - DNA, 20 bp, synthetic construct
  source 1..20: mol_type = other DNA
agtgggggtgaattcagtgt

SEQ ID NO: 228 - DNA, 20 bp, synthetic construct
  source 1..20: mol_type = other DNA
cagtgggggtgaattcagtg

SEQ ID NO: 229 - DNA, 20 bp, synthetic construct
  source 1..20: mol_type = other DNA
tcagtgggggtgaattcagt

SEQ ID NO: 230 - DNA, 20 bp, synthetic construct
  source 1..20: mol_type = other DNA
ttcagtgggggtgaattcag

SEQ ID NO: 231 - DNA, 20 bp, synthetic construct
  source 1..20: mol_type = other DNA
acccccactgaaaaagatga

SEQ ID NO: 232 - DNA, 20 bp, synthetic construct
  source 1..20: mol_type = other DNA
acacggcaggcatactcatc

SEQ ID NO: 233 - DNA, 20 bp, synthetic construct
  source 1..20: mol_type = other DNA
ggctgtgacaaagtcacatg

SEQ ID NO: 234 - DNA, 20 bp, synthetic construct
  source 1..20: mol_type = other DNA
gtcacagcccaagatagtta

SEQ ID NO: 235 - DNA, 20 bp, synthetic construct
  source 1..20: mol_type = other DNA
tcacagcccaagatagttaa

SEQ ID NO: 236 - DNA, 20 bp, synthetic construct
  source 1..20: mol_type = other DNA
actatcttgggctgtgacaa

SEQ ID NO: 237 - DNA, 20 bp, synthetic construct
  source 1..20: mol_type = other DNA
ccccacttaactatcttggg

SEQ ID NO: 238 - RNA, 20 nt, synthetic construct
  source 1..20: mol_type = other RNA
ccttccgctcacctccgcct

SEQ ID NO: 239 - RNA, 20 nt, synthetic construct
  source 1..20: mol_type = other RNA
ccttccgctcacctccgcct

SEQ ID NO: 240 - RNA, 20 nt, synthetic construct
  source 1..20: mol_type = other RNA
cgctcacctccgcctgagca

SEQ ID NO: 241 - RNA, 20 nt, synthetic construct
  source 1..20: mol_type = other RNA
tccactgctcaggcggaggt

SEQ ID NO: 242 - RNA, 20 nt, synthetic construct
  source 1..20: mol_type = other RNA
tagcaccgcccagacgactg

SEQ ID NO: 243 - RNA, 20 nt, synthetic construct
  source 1..20: mol_type = other RNA
aggcatgcagatcccacagg

SEQ ID NO: 244 - RNA, 20 nt, synthetic construct
  source 1..20: mol_type = other RNA
cacaggcgccctggccagtc

SEQ ID NO: 245 - RNA, 20 nt, synthetic construct
  source 1..20: mol_type = other RNA
tctgggcggtgctacaactg

SEQ ID NO: 246 - RNA, 20 nt, synthetic construct
  source 1..20: mol_type = other RNA
gcatgcctggagcagcccca

SEQ ID NO: 247 - RNA, 20 nt, synthetic construct
  source 1..20: mol_type = other RNA
tagcaccgcccagacgactg

SEQ ID NO: 248 - RNA, 20 nt, synthetic construct
  source 1..20: mol_type = other RNA
tggccgccagcccagttgta

SEQ ID NO: 249 - RNA, 20 nt, synthetic construct
  source 1..20: mol_type = other RNA
cttccgctcacctccgcctg

SEQ ID NO: 250 - RNA, 20 nt, synthetic construct
  source 1..20: mol_type = other RNA
cagggcctgtctggggagtc

SEQ ID NO: 251 - RNA, 20 nt, synthetic construct
  source 1..20: mol_type = other RNA
tccccagccctgctcgtggt

SEQ ID NO: 252 - RNA, 20 nt, synthetic construct
  source 1..20: mol_type = other RNA
ggtcaccacgagcagggctg

SEQ ID NO: 253 - RNA, 20 nt, synthetic construct
  source 1..20: mol_type = other RNA
tccccttcggtcaccacgag

SEQ ID NO: 254 - RNA, 20 nt, synthetic construct
  source 1..20: mol_type = other RNA
gagaagctgcaggtgaaggt

SEQ ID NO: 255 - RNA, 20 nt, synthetic construct
  source 1..20: mol_type = other RNA
acctgcagcttctccaacac

SEQ ID NO: 256 - RNA, 20 nt, synthetic construct
  source 1..20: mol_type = other RNA
tccaacacatcggagagctt

SEQ ID NO: 257 - RNA, 20 nt, synthetic construct
  source 1..20: mol_type = other RNA
gcacgaagctctccgatgtg

SEQ ID NO: 258 - RNA, 20 nt, synthetic construct
  source 1..20: mol_type = other RNA
agcacgaagctctccgatgt

SEQ ID NO: 259 - RNA, 20 nt, synthetic construct
  source 1..20: mol_type = other RNA
gtgctaaactggtaccgcat

SEQ ID NO: 260 - RNA, 20 nt, synthetic construct
  source 1..20: mol_type = other RNA
ctggggctcatgcggtacca

SEQ ID NO: 261 - RNA, 20 nt, synthetic construct
  source 1..20: mol_type = other RNA
tccgtctggttgctggggct

SEQ ID NO: 262 - RNA, 20 nt, synthetic construct
  source 1..20: mol_type = other RNA
cccgaggaccgcagccagcc

SEQ ID NO: 263 - RNA, 20 nt, synthetic construct
  source 1..20: mol_type = other RNA
tgtgacacggaagcggcagt

SEQ ID NO: 264 - RNA, 20 nt, synthetic construct
  source 1..20: mol_type = other RNA
cgtgtcacacaactgcccaa

SEQ ID NO: 265 - RNA, 20 nt, synthetic construct
  source 1..20: mol_type = other RNA
ggcagttgtgtgacacggaa

SEQ ID NO: 266 - RNA, 20 nt, synthetic construct
  source 1..20: mol_type = other RNA
cacatgagcgtggtcagggc

SEQ ID NO: 267 - RNA, 20 nt, synthetic construct
  source 1..20: mol_type = other RNA
cgccgggccctgaccacgct

SEQ ID NO: 268 - RNA, 20 nt, synthetic construct
  source 1..20: mol_type = other RNA
ggggccagggagatggcccc

SEQ ID NO: 269 - RNA, 20 nt, synthetic construct
  source 1..20: mol_type = other RNA
atctgcgccttgggggccag

SEQ ID NO: 270 - RNA, 20 nt, synthetic construct
  source 1..20: mol_type = other RNA
gatctgcgccttgggggcca

SEQ ID NO: 271 - RNA, 20 nt, synthetic construct
  source 1..20: mol_type = other RNA
ccagacaggccctggaaccc

SEQ ID NO: 272 - RNA, 20 nt, synthetic construct
  source 1..20: mol_type = other RNA
ccagccctgctcgtggtgac

SEQ ID NO: 273 - RNA, 20 nt, synthetic construct
  source 1..20: mol_type = other RNA
tctctggaagggcacaaagg

SEQ ID NO: 274 - RNA, 20 nt, synthetic construct
  source 1..20: mol_type = other RNA
gtgcccttccagagagaagg

SEQ ID NO: 275 - RNA, 20 nt, synthetic construct
  source 1..20: mol_type = other RNA
tgcccttccagagagaaggg

SEQ ID NO: 276 - RNA, 20 nt, synthetic construct
  source 1..20: mol_type = other RNA
tgcccttctctctggaaggg

SEQ ID NO: 277 - RNA, 20 nt, synthetic construct
  source 1..20: mol_type = other RNA
cagagagaagggcagaagtg

SEQ ID NO: 278 - RNA, 20 nt, synthetic construct
  source 1..20: mol_type = other RNA
gaactggccggctggcctgg

SEQ ID NO: 279 - RNA, 20 nt, synthetic construct
  source 1..20: mol_type = other RNA
ggaactggccggctggcctg

SEQ ID NO: 280 - RNA, 20 nt, synthetic construct
  source 1..20: mol_type = other RNA
caaaccctggtggttggtgt

SEQ ID NO: 281 - RNA, 20 nt, synthetic construct
  source 1..20: mol_type = other RNA
gtgtcgtgggcggcctgctg

SEQ ID NO: 282 - RNA, 20 nt, synthetic construct
  source 1..20: mol_type = other RNA
cctcgtgcggcccgggagca

SEQ ID NO: 283 - RNA, 20 nt, synthetic construct
  source 1..20: mol_type = other RNA
tccctgcagagaaacacact

SEQ ID NO: 284 - RNA, 20 nt, synthetic construct
  source 1..20: mol_type = other RNA
ctctgcagggacaataggag

SEQ ID NO: 285 - RNA, 20 nt, synthetic construct
  source 1..20: mol_type = other RNA
tctgcagggacaataggagc

SEQ ID NO: 286 - RNA, 20 nt, synthetic construct
  source 1..20: mol_type = other RNA
ctcctcaaagaaggaggacc

SEQ ID NO: 287 - RNA, 20 nt, synthetic construct
  source 1..20: mol_type = other RNA
tcctcaaagaaggaggaccc

SEQ ID NO: 288 - RNA, 20 nt, synthetic construct
  source 1..20: mol_type = other RNA
tctgtggactatggggagct

SEQ ID NO: 289 - RNA, 20 nt, synthetic construct
  source 1..20: mol_type = other RNA
tctcgccactggaaatccag

SEQ ID NO: 290 - RNA, 20 nt, synthetic construct
  source 1..20: mol_type = other RNA
ccagtggcgagagaagaccc

SEQ ID NO: 291 - RNA, 20 nt, synthetic construct
  source 1..20: mol_type = other RNA
cagtggcgagagaagacccc

SEQ ID NO: 292 - RNA, 20 nt, synthetic construct
  source 1..20: mol_type = other RNA
cgctaggaaagacaatggtg

SEQ ID NO: 293 - RNA, 20 nt, synthetic construct
  source 1..20: mol_type = other RNA
tctttcctagcggaatgggc

SEQ ID NO: 294 - RNA, 20 nt, synthetic construct
  source 1..20: mol_type = other RNA
cctagcggaatgggcacctc

SEQ ID NO: 295 - RNA, 20 nt, synthetic construct
  source 1..20: mol_type = other RNA
ctagcggaatgggcacctca

SEQ ID NO: 296 - RNA, 20 nt, synthetic construct
  source 1..20: mol_type = other RNA
gcccctctgaccggcttcct

SEQ ID NO: 297 - RNA, 20 nt, synthetic construct
  source 1..20: mol_type = other RNA
cttggccaccagtgttctgc

SEQ ID NO: 298 - RNA, 20 nt, synthetic construct
  source 1..20: mol_type = other RNA
gccaccagtgttctgcagac

SEQ ID NO: 299 - RNA, 20 nt, synthetic construct
  source 1..20: mol_type = other RNA
tgcagaccctccaccatgag

SEQ ID NO: 300 - RNA, 20 nt, synthetic construct
  source 1..20: mol_type = other RNA
tcctgaggaaatgcgctgac

SEQ ID NO: 301 - RNA, 20 nt, synthetic construct
  source 1..20: mol_type = other RNA
cctcaggagaagcaggcagg

SEQ ID NO: 302 - RNA, 20 nt, synthetic construct
  source 1..20: mol_type = other RNA
ctcaggagaagcaggcaggg

SEQ ID NO: 303 - RNA, 20 nt, synthetic construct
  source 1..20: mol_type = other RNA
caggccgtccaggggctgag

SEQ ID NO: 304 - RNA, 20 nt, synthetic construct
  source 1..20: mol_type = other RNA
agacatgagtcctgtggtgg

SEQ ID NO: 305 - RNA, 20 nt, synthetic construct
  source 1..20: mol_type = other RNA
aggtcctgccagcacagagc

SEQ ID NO: 306 - RNA, 20 nt, synthetic construct
  source 1..20: mol_type = other RNA
agggagctggacgcaggcag

SEQ ID NO: 307 - RNA, 20 nt, synthetic construct
  source 1..20: mol_type = other RNA
agccccgggccgcaggcagc

SEQ ID NO: 308 - RNA, 20 nt, synthetic construct
  source 1..20: mol_type = other RNA
aggcaggaggctccggggcg

SEQ ID NO: 309 - RNA, 20 nt, synthetic construct
  source 1..20: mol_type = other RNA
ggggctggttggagatggcc

SEQ ID NO: 310 - RNA, 20 nt, synthetic construct
  source 1..20: mol_type = other RNA
gagatggccttggagcagcc

SEQ ID NO: 311 - RNA, 20 nt, synthetic construct
  source 1..20: mol_type = other RNA
gctgctccaaggccatctcc

SEQ ID NO: 312 - RNA, 20 nt, synthetic construct
  source 1..20: mol_type = other RNA
gagcagccaaggtgcccctg

SEQ ID NO: 313 - RNA, 20 nt, synthetic construct
  source 1..20: mol_type = other RNA
gggatgccactgccaggggc

SEQ ID NO: 314 - RNA, 20 nt, synthetic construct
  source 1..20: mol_type = other RNA
cgggatgccactgccagggg

SEQ ID NO: 315 - RNA, 20 nt, synthetic construct
  source 1..20: mol_type = other RNA
ggccctgcgtccagggcgtt

SEQ ID NO: 316 - RNA, 20 nt, synthetic construct
  source 1..20: mol_type = other RNA
tctgctccctgcaggcctag

SEQ ID NO: 317 - RNA, 20 nt, synthetic construct
  source 1..20: mol_type = other RNA
tctaggcctgcagggagcag

SEQ ID NO: 318 - RNA, 20 nt, synthetic construct
  source 1..20: mol_type = other RNA
cctgaaacttctctaggcct

SEQ ID NO: 319 - RNA, 20 nt, synthetic construct
  source 1..20: mol_type = other RNA
tgaccttccctgaaacttct

SEQ ID NO: 320 - RNA, 20 nt, synthetic construct
  source 1..20: mol_type = other RNA
cagggaaggtcagaagagct

SEQ ID NO: 321 - RNA, 20 nt, synthetic construct
  source 1..20: mol_type = other RNA
agggaaggtcagaagagctc

SEQ ID NO: 322 - RNA, 20 nt, synthetic construct
  source 1..20: mol_type = other RNA
ctgccctgcccaccacagcc

SEQ ID NO: 323 - RNA, 20 nt, synthetic construct
  source 1..20: mol_type = other RNA
cctgccctgcccaccacagc

SEQ ID NO: 324 - RNA, 20 nt, synthetic construct
  source 1..20: mol_type = other RNA
acacatgcccaggcagcacc

SEQ ID NO: 325 - RNA, 20 nt, synthetic construct
  source 1..20: mol_type = other RNA
cacatgcccaggcagcacct

SEQ ID NO: 326 - RNA, 20 nt, synthetic construct
  source 1..20: mol_type = other RNA
cctgccccacaaagggcctg

SEQ ID NO: 327 - RNA, 20 nt, synthetic construct
  source 1..20: mol_type = other RNA
gtggggcagggaagctgagg

SEQ ID NO: 328 - RNA, 20 nt, synthetic construct
  source 1..20: mol_type = other RNA
tggggcagggaagctgaggc

SEQ ID NO: 329 - RNA, 20 nt, synthetic construct
  source 1..20: mol_type = other RNA
ctgcctcagcttccctgccc

SEQ ID NO: 330 - RNA, 20 nt, synthetic construct
  source 1..20: mol_type = other RNA
caggcccagccagcactctg

SEQ ID NO: 331 - RNA, 20 nt, synthetic construct
  source 1..20: mol_type = other RNA
aggcccagccagcactctgg

SEQ ID NO: 332 - RNA, 20 nt, synthetic construct
  source 1..20: mol_type = other RNA
caccccagcccctcacacca

SEQ ID NO: 333 - RNA, 20 nt, synthetic construct
  source 1..20: mol_type = other RNA
ggaccgtaggatgtccctct

SEQ ID NO: 334 - DNA, 20 bp, synthetic construct
  source 1..20: mol_type = other DNA
ctacacaatgcgttgcctgg

SEQ ID NO: 335 - DNA, 20 bp, synthetic construct
  source 1..20: mol_type = other DNA
gggctctgacaggtaggacc

SEQ ID NO: 336 - DNA, 20 bp, synthetic construct
  source 1..20: mol_type = other DNA
tgtaggaatcccagccaggc

SEQ ID NO: 337 - DNA, 20 bp, synthetic construct
  source 1..20: mol_type = other DNA
cctggctccacgccctgctg

SEQ ID NO: 338 - DNA, 20 bp, synthetic construct
  source 1..20: mol_type = other DNA
gggaagctgagggcacgagg

SEQ ID NO: 339 - DNA, 20 bp, synthetic construct
  source 1..20: mol_type = other DNA
acagcgatgctgaccccctg

SEQ ID NO: 340 - DNA, 20 bp, synthetic construct
  source 1..20: mol_type = other DNA
ttaacagcgatgctgacccc

SEQ ID NO: 341 - DNA, 20 bp, synthetic construct
  source 1..20: mol_type = other DNA
tatgaccagatggacctggc

SEQ ID NO: 342 - DNA, 20 bp, synthetic construct
  source 1..20: mol_type = other DNA
gggcccctagaaggtggcta

SEQ ID NO: 343 - DNA, 20 bp, synthetic construct
  source 1..20: mol_type = other DNA
taggggccccaactccatgg

SEQ ID NO: 344 - DNA, 20 bp, synthetic construct
  source 1..20: mol_type = other DNA
agaagctccaggtagccacc

SEQ ID NO: 345 - DNA, 20 bp, synthetic construct
  source 1..20: mol_type = other DNA
tccagccaggtccatctggt

SEQ ID NO: 346 - DNA, 20 bp, synthetic construct
  source 1..20: mol_type = other DNA
ttctccagccaggtccatct

SEQ ID NO: 347 - RNA, 20 nt, synthetic construct
  source 1..20: mol_type = other RNA
ccgctgttgccgccgctgct

SEQ ID NO: 348 - RNA, 20 nt, synthetic construct
  source 1..20: mol_type = other RNA
ccgccgctgctgctgctgtt

SEQ ID NO: 349 - RNA, 20 nt, synthetic construct
  source 1..20: mol_type = other RNA
ctgctactgtgccccaccgg

SEQ ID NO: 350 - RNA, 20 nt, synthetic construct
  source 1..20: mol_type = other RNA
ataatctccatcctcgtcct

SEQ ID NO: 351 - RNA, 20 nt, synthetic construct
  source 1..20: mol_type = other RNA
tgaagagctgatgctcgccc

SEQ ID NO: 352 - RNA, 20 nt, synthetic construct
  source 1..20: mol_type = other RNA
gagcaacggcggaaggtggc

SEQ ID NO: 353 - RNA, 20 nt, synthetic construct
  source 1..20: mol_type = other RNA
ctggcagcctccaggcctcc

SEQ ID NO: 354 - RNA, 20 nt, synthetic construct
  source 1..20: mol_type = other RNA
tggtgctgatggaggagacc

SEQ ID NO: 355 - RNA, 20 nt, synthetic construct
  source 1..20: mol_type = other RNA
aatctgtagcctctgggtct

SEQ ID NO: 356 - RNA, 20 nt, synthetic construct
  source 1..20: mol_type = other RNA
ttcaatctgtagcctctggg

SEQ ID NO: 357 - RNA, 20 nt, synthetic construct
  source 1..20: mol_type = other RNA
gttcaatctgtagcctctgg

SEQ ID NO: 358 - RNA, 20 nt, synthetic construct
  source 1..20: mol_type = other RNA
aacaaactgcccaccgcctg

SEQ ID NO: 359 - RNA, 20 nt, synthetic construct
  source 1..20: mol_type = other RNA
atgacatagccccggcgggc

SEQ ID NO: 360 - RNA, 20 nt, synthetic construct
  source 1..20: mol_type = other RNA
tacatatcttttatgacctc

SEQ ID NO: 361 - RNA, 20 nt, synthetic construct
  source 1..20: mol_type = other RNA
tatgacctcttccctggctt

SEQ ID NO: 362 - RNA, 20 nt, synthetic construct
  source 1..20: mol_type = other RNA
atgacctcttccctggcttc

SEQ ID NO: 363 - RNA, 20 nt, synthetic construct
  source 1..20: mol_type = other RNA
tgacctcttccctggcttct

SEQ ID NO: 364 - RNA, 20 nt, synthetic construct
  source 1..20: mol_type = other RNA
accaagaagccagggaagag

SEQ ID NO: 365 - RNA, 20 nt, synthetic construct
  source 1..20: mol_type = other RNA
cctggcttcttggtgaagat

SEQ ID NO: 366 - RNA, 20 nt, synthetic construct
  source 1..20: mol_type = other RNA
ttggtgaagatgagcagtga

SEQ ID NO: 367 - RNA, 20 nt, synthetic construct
  source 1..20: mol_type = other RNA
gtgaagatgagcagtgacct

SEQ ID NO: 368 - RNA, 20 nt, synthetic construct
  source 1..20: mol_type = other RNA
ccccatgtggagtacattga

SEQ ID NO: 369 - RNA, 20 nt, synthetic construct
  source 1..20: mol_type = other RNA
ctcaatgtactccacatggg

SEQ ID NO: 370 - RNA, 20 nt, synthetic construct
  source 1..20: mol_type = other RNA
aggaagactcctttgtcttc

SEQ ID NO: 371 - RNA, 20 nt, synthetic construct
  source 1..20: mol_type = other RNA
gtcttcgcccagagcatccc

SEQ ID NO: 372 - RNA, 20 nt, synthetic construct
  source 1..20: mol_type = other RNA
tcttcgcccagagcatccca

SEQ ID NO: 373 - RNA, 20 nt, synthetic construct
  source 1..20: mol_type = other RNA
gcccagagcatcccatggaa

SEQ ID NO: 374 - RNA, 20 nt, synthetic construct
  source 1..20: mol_type = other RNA
catgggatgctctgggcgaa

SEQ ID NO: 375 - RNA, 20 nt, synthetic construct
  source 1..20: mol_type = other RNA
gctccaggttccatgggatg

SEQ ID NO: 376 - RNA, 20 nt, synthetic construct
  source 1..20: mol_type = other RNA
tcccagcatggcaccagaca

SEQ ID NO: 377 - RNA, 20 nt, synthetic construct
  source 1..20: mol_type = other RNA
ctctgtctggtgccatgctg

SEQ ID NO: 378 - RNA, 20 nt, synthetic construct
  source 1..20: mol_type = other RNA
gataccagcatccagggtgc

SEQ ID NO: 379 - RNA, 20 nt, synthetic construct
  source 1..20: mol_type = other RNA
agggcagggtcaccatcacc

SEQ ID NO: 380 - RNA, 20 nt, synthetic construct
  source 1..20: mol_type = other RNA
aagtcggtgatggtgaccct

SEQ ID NO: 381 - RNA, 20 nt, synthetic construct
  source 1..20: mol_type = other RNA
aacagcgtgccggaggagga

SEQ ID NO: 382 - RNA, 20 nt, synthetic construct
  source 1..20: mol_type = other RNA
gccacaccagcatcccggcc

SEQ ID NO: 383 - RNA, 20 nt, synthetic construct
  source 1..20: mol_type = other RNA
agcacacgcaggctgtgcag

SEQ ID NO: 384 - RNA, 20 nt, synthetic construct
  source 1..20: mol_type = other RNA
acagttgagcacacgcaggc

SEQ ID NO: 385 - RNA, 20 nt, synthetic construct
  source 1..20: mol_type = other RNA
ccttgacagttgagcacacg

SEQ ID NO: 386 - RNA, 20 nt, synthetic construct
  source 1..20: mol_type = other RNA
gctgactcttccgaataaac

SEQ ID NO: 387 - RNA, 20 nt, synthetic construct
  source 1..20: mol_type = other RNA
attcggaagagtcagctaat

SEQ ID NO: 388 - RNA, 20 nt, synthetic construct
  source 1..20: mol_type = other RNA
ttcggaagagtcagctaatc

SEQ ID NO: 389 - RNA, 20 nt, synthetic construct
  source 1..20: mol_type = other RNA
ggaagagtcagctaatccag

SEQ ID NO: 390 - RNA, 20 nt, synthetic construct
  source 1..20: mol_type = other RNA
tgctgcccctggccggtggg

SEQ ID NO: 391 - RNA, 20 nt, synthetic construct
  source 1..20: mol_type = other RNA
aggatgcggctatacccacc

SEQ ID NO: 392 - RNA, 20 nt, synthetic construct
  source 1..20: mol_type = other RNA
ccagctgctgcaaccagcac

SEQ ID NO: 393 - RNA, 20 nt, synthetic construct
  source 1..20: mol_type = other RNA
cagcagctgggaacttccgg

SEQ ID NO: 394 - RNA, 20 nt, synthetic construct
  source 1..20: mol_type = other RNA
cgggacgacgcctgcctcta

SEQ ID NO: 395 - RNA, 20 nt, synthetic construct
  source 1..20: mol_type = other RNA
gtggccccgactgtgatgac

SEQ ID NO: 396 - RNA, 20 nt, synthetic construct
  source 1..20: mol_type = other RNA
ccttggggactttggggact

SEQ ID NO: 397 - RNA, 20 nt, synthetic construct
  source 1..20: mol_type = other RNA
gtccccaaagtccccaaggt

SEQ ID NO: 398 - RNA, 20 nt, synthetic construct
  source 1..20: mol_type = other RNA
gggactttggggactaattt

SEQ ID NO: 399 - RNA, 20 nt, synthetic construct
  source 1..20: mol_type = other RNA
ggggactaattttggacgct

SEQ ID NO: 400 - RNA, 20 nt, synthetic construct
  source 1..20: mol_type = other RNA
gggactaattttggacgctg

SEQ ID NO: 401 - RNA, 20 nt, synthetic construct
  source 1..20: mol_type = other RNA
tggacgctgtgtggatctct

SEQ ID NO: 402 - RNA, 20 nt, synthetic construct
  source 1..20: mol_type = other RNA
ggacgctgtgtggatctctt

SEQ ID NO: 403 - RNA, 20 nt, synthetic construct
  source 1..20: mol_type = other RNA
gacgctgtgtggatctcttt

SEQ ID NO: 404 - RNA, 20 nt, synthetic construct
  source 1..20: mol_type = other RNA
ccgggggcaaagagatccac

SEQ ID NO: 405 - RNA, 20 nt, synthetic construct
  source 1..20: mol_type = other RNA
gcccccgggaaggacatcat

SEQ ID NO: 406 - RNA, 20 nt, synthetic construct
  source 1..20: mol_type = other RNA
cccccgggaaggacatcatc

SEQ ID NO: 407 - RNA, 20 nt, synthetic construct
  source 1..20: mol_type = other RNA
atgtcacagagtgggacctc

SEQ ID NO: 408 - RNA, 20 nt, synthetic construct
  source 1..20: mol_type = other RNA
tggctcggatgctgagccgg

SEQ ID NO: 409 - RNA, 20 nt, synthetic construct
  source 1..20: mol_type = other RNA
ccctggccgagctgcggcag

SEQ ID NO: 410 - RNA, 20 nt, synthetic construct
  source 1..20: mol_type = other RNA
gtagagaagtggatcagcct

SEQ ID NO: 411 - RNA, 20 nt, synthetic construct
  source 1..20: mol_type = other RNA
ggtagagaagtggatcagcc

SEQ ID NO: 412 - RNA, 20 nt, synthetic construct
  source 1..20: mol_type = other RNA
tctaccaaagacgtcatcaa

SEQ ID NO: 413 - RNA, 20 nt, synthetic construct
  source 1..20: mol_type = other RNA
atgacgtctttggtagagaa

SEQ ID NO: 414 - RNA, 20 nt, synthetic construct
  source 1..20: mol_type = other RNA
cctgaggaccagcaggtgct

SEQ ID NO: 415 - RNA, 20 nt, synthetic construct
  source 1..20: mol_type = other RNA
ggggtcagcacctgctggtc

SEQ ID NO: 416 - RNA, 20 nt, synthetic construct
  source 1..20: mol_type = other RNA
gagtgggccccgagtgtgcc

SEQ ID NO: 417 - RNA, 20 nt, synthetic construct
  source 1..20: mol_type = other RNA
tggggcacagcgggctgtag

SEQ ID NO: 418 - RNA, 20 nt, synthetic construct
  source 1..20: mol_type = other RNA
tccaggagcgggaggcgtcg

SEQ ID NO: 419 - RNA, 20 nt, synthetic construct
  source 1..20: mol_type = other RNA
cagacctgctggcctcctat

SEQ ID NO: 420 - RNA, 20 nt, synthetic construct
  source 1..20: mol_type = other RNA
agggccttgcagacctgctg

SEQ ID NO: 421 - RNA, 20 nt, synthetic construct
  source 1..20: mol_type = other RNA
gggggtgagggtgtctatgc

SEQ ID NO: 422 - RNA, 20 nt, synthetic construct
  source 1..20: mol_type = other RNA
ggggtgagggtgtctatgcc

SEQ ID NO: 423 - RNA, 20 nt, synthetic construct
  source 1..20: mol_type = other RNA
gcacggggaaccaggcagca

SEQ ID NO: 424 - RNA, 20 nt, synthetic construct
  source 1..20: mol_type = other RNA
cccgtgccaactgcagcatc

SEQ ID NO: 425 - RNA, 20 nt, synthetic construct
  source 1..20: mol_type = other RNA
tggatgctgcagttggcacg

SEQ ID NO: 426 - RNA, 20 nt, synthetic construct
  source 1..20: mol_type = other RNA
tggtggcagtggacatgggt

SEQ ID NO: 427 - RNA, 20 nt, synthetic construct
  source 1..20: mol_type = other RNA
cacttcccaatggaagctgc

SEQ ID NO: 428 - RNA, 20 nt, synthetic construct
  source 1..20: mol_type = other RNA
cattgggaagtggaagacct

SEQ ID NO: 429 - RNA, 20 nt, synthetic construct
  source 1..20: mol_type = other RNA
ggaagtggaagaccttagtg

SEQ ID NO: 430 - RNA, 20 nt, synthetic construct
  source 1..20: mol_type = other RNA
gtgtccggaggcagcctgcg

SEQ ID NO: 431 - RNA, 20 nt, synthetic construct
  source 1..20: mol_type = other RNA
gccaccaggcggccagtgtc

SEQ ID NO: 432 - RNA, 20 nt, synthetic construct
  source 1..20: mol_type = other RNA
ctgctgccatgccccagggc

SEQ ID NO: 433 - RNA, 20 nt, synthetic construct
  source 1..20: mol_type = other RNA
cagccctggggcatggcagc

SEQ ID NO: 434 - RNA, 20 nt, synthetic construct
  source 1..20: mol_type = other RNA
cattccagccctggggcatg

SEQ ID NO: 435 - RNA, 20 nt, synthetic construct
  source 1..20: mol_type = other RNA
gcattccagccctggggcat

SEQ ID NO: 436 - RNA, 20 nt, synthetic construct
  source 1..20: mol_type = other RNA
tgcattccagccctggggca

SEQ ID NO: 437 - RNA, 20 nt, synthetic construct
  source 1..20: mol_type = other RNA
attttgcattccagccctgg

SEQ ID NO: 438 - RNA, 20 nt, synthetic construct
  source 1..20: mol_type = other RNA
catccagtcagggtccatcc

SEQ ID NO: 439 - RNA, 20 nt, synthetic construct
  source 1..20: mol_type = other RNA
tccacgctgtaggctcccag

SEQ ID NO: 440 - RNA, 20 nt, synthetic construct
  source 1..20: mol_type = other RNA
ccacacacaggttgtccacg

SEQ ID NO: 441 - RNA, 20 nt, synthetic construct
  source 1..20: mol_type = other RNA
tccactggtcctgtctgctc

SEQ ID NO: 442 - RNA, 20 nt, synthetic construct
  source 1..20: mol_type = other RNA
ctgaaggccggctccggcag

SEQ ID NO: 443 - DNA, 20 bp, synthetic construct
  source 1..20: mol_type = other DNA
gaagctatgttttccatctc

SEQ ID NO: 444 - DNA, 20 bp, synthetic construct
  source 1..20: mol_type = other DNA
gcaggggcagccgccccctg

SEQ ID NO: 445 - DNA, 20 bp, synthetic construct
  source 1..20: mol_type = other DNA
ctcctagaacccaacaggta

SEQ ID NO: 446 - DNA, 20 bp, synthetic construct
  source 1..20: mol_type = other DNA
gaaagacctcctctgtgtcc

SEQ ID NO: 447 - DNA, 20 bp, synthetic construct
  source 1..20: mol_type = other DNA
tccatctcggggttggcagg

SEQ ID NO: 448 - DNA, 20 bp, synthetic construct
  source 1..20: mol_type = other DNA
ttcctgatggtggagatgga

SEQ ID NO: 449 - DNA, 20 bp, synthetic construct
  source 1..20: mol_type = other DNA
ctgactcccagctctgaccc

SEQ ID NO: 450 - DNA, 20 bp, synthetic construct
  source 1..20: mol_type = other DNA
tggggtcagagctgggagtc

SEQ ID NO: 451 - DNA, 20 bp, synthetic construct
  source 1..20: mol_type = other DNA
gaaagacctcctctgtgtcc

SEQ ID NO: 452 - DNA, 20 bp, synthetic construct
  source 1..20: mol_type = other DNA
cgaagctatgttttccatct

SEQ ID NO: 453 - DNA, 20 bp, synthetic construct
  source 1..20: mol_type = other DNA
gaagctatgttttccatctc

SEQ ID NO: 454 - DNA, 20 bp, synthetic construct
  source 1..20: mol_type = other DNA
tccatctccaccatcaggaa

SEQ ID NO: 455 - DNA, 20 bp, synthetic construct
  source 1..20: mol_type = other DNA
ccatctccaccatcaggaac

SEQ ID NO: 456 - DNA, 20 bp, synthetic construct
  source 1..20: mol_type = other DNA
ctgatggtggagatggaaaa

SEQ ID NO: 457 - DNA, 20 bp, synthetic construct
  source 1..20: mol_type = other DNA
catctccaccatcaggaaca

SEQ ID NO: 458 - DNA, 20 bp, synthetic construct
  source 1..20: mol_type = other DNA
ttcctgatggtggagatgga

SEQ ID NO: 459 - DNA, 20 bp, synthetic construct
  source 1..20: mol_type = other DNA
gcaggggcagccgccccctg

SEQ ID NO: 460 - DNA, 20 bp, synthetic construct
  source 1..20: mol_type = other DNA
tccatctcggggttggcagg

SEQ ID NO: 461 - DNA, 20 bp, synthetic construct
  source 1..20: mol_type = other DNA
taggagcaaattgtccatct

SEQ ID NO: 462 - DNA, 20 bp, synthetic construct
  source 1..20: mol_type = other DNA
ggttctaggagcaaattgtc

SEQ ID NO: 463 - DNA, 20 bp, synthetic construct
  source 1..20: mol_type = other DNA
gctcctagaacccaacaggt

SEQ ID NO: 464 - DNA, 20 bp, synthetic construct
  source 1..20: mol_type = other DNA
ctcctagaacccaacaggta

SEQ ID NO: 465 - DNA, 20 bp, synthetic construct
  source 1..20: mol_type = other DNA
tccagacgccatctttcagg

SEQ ID NO: 466 - DNA, 20 bp, synthetic construct
  source 1..20: mol_type = other DNA
tggtaagagtcctcctgccc

SEQ ID NO: 467 - DNA, 20 bp, synthetic construct
  source 1..20: mol_type = other DNA
ttacagcatcttgggtcagg

SEQ ID NO: 468 - DNA, 20 bp, synthetic construct
  source 1..20: mol_type = other DNA
ggtcaggtgggccggcagct

SEQ ID NO: 469 - DNA, 20 bp, synthetic construct
  source 1..20: mol_type = other DNA
ctatcattggagatgacatt

SEQ ID NO: 470 - DNA, 20 bp, synthetic construct
  source 1..20: mol_type = other DNA
gagatgacattaaccggaga

SEQ ID NO: 471 - DNA, 20 bp, synthetic construct
  source 1..20: mol_type = other DNA
tggaactctgtgtcgtatct

SEQ ID NO: 472 - DNA, 20 bp, synthetic construct
  source 1..20: mol_type = other DNA
cagaatttactggagcagct

SEQ ID NO: 473 - DNA, 20 bp, synthetic construct
  source 1..20: mol_type = other DNA
actggagcagctgcagccca

SEQ ID NO: 474 - DNA, 20 bp, synthetic construct
  source 1..20: mol_type = other DNA
ccagctgtgggctgcagctg

SEQ ID NO: 475 - DNA, 20 bp, synthetic construct
  source 1..20: mol_type = other DNA
gtaggcattcccagctgtgg

SEQ ID NO: 476 - DNA, 20 bp, synthetic construct
  source 1..20: mol_type = other DNA
gtgaagagttcgtaggcatt

SEQ ID NO: 477 - DNA, 20 bp, synthetic construct
  source 1..20: mol_type = other DNA
accaagattgcctccaggta

SEQ ID NO: 478 - DNA, 20 bp, synthetic construct
  source 1..20: mol_type = other DNA
cctccaggtacccaccacca

SEQ ID NO: 479 - DNA, 20 bp, synthetic construct
  source 1..20: mol_type = other DNA
ctaatgtggatactaactcc

SEQ ID NO: 480 - DNA, 20 bp, synthetic construct
  source 1..20: mol_type = other DNA
ttccgtgtggcagctgacat

SEQ ID NO: 481 - DNA, 20 bp, synthetic construct
  source 1..20: mol_type = other DNA
ctgatggcaacttcaactgg

SEQ ID NO: 482 - DNA, 20 bp, synthetic construct
  source 1..20: mol_type = other DNA
tactttgctagcaaactggt

SEQ ID NO: 483 - DNA, 20 bp, synthetic construct
  source 1..20: mol_type = other DNA
agcaccagtttgctagcaaa

SEQ ID NO: 484 - DNA, 20 bp, synthetic construct
  source 1..20: mol_type = other DNA
aactggggccgggttgttgc

SEQ ID NO: 485 - DNA, 20 bp, synthetic construct
  source 1..20: mol_type = other DNA
ttctctttcctgtaggatga

SEQ ID NO: 486 - DNA, 20 bp, synthetic construct
  source 1..20: mol_type = other DNA
tctttcctgtaggatgattg

SEQ ID NO: 487 - DNA, 20 bp, synthetic construct
  source 1..20: mol_type = other DNA
cctgtaggatgattgctaat

SEQ ID NO: 488 - DNA, 20 bp, synthetic construct
  source 1..20: mol_type = other DNA
ctgtaggatgattgctaatg

SEQ ID NO: 489 - DNA, 20 bp, synthetic construct
  source 1..20: mol_type = other DNA
ctaatgtggatactaactcc

SEQ ID NO: 490 - DNA, 20 bp, synthetic construct
  source 1..20: mol_type = other DNA
ttccgtgtggcagctgacat

SEQ ID NO: 491 - DNA, 20 bp, synthetic construct
  source 1..20: mol_type = other DNA
cgtgtggcagctgacatgtt

SEQ ID NO: 492 - DNA, 20 bp, synthetic construct
  source 1..20: mol_type = other DNA
ccatcagcaaacatgtcagc

SEQ ID NO: 493 - DNA, 20 bp, synthetic construct
  source 1..20: mol_type = other DNA
aagttgccatcagcaaacat

SEQ ID NO: 494 - DNA, 20 bp, synthetic construct
  source 1..20: mol_type = other DNA
gctgatggcaacttcaactg

SEQ ID NO: 495 - DNA, 20 bp, synthetic construct
  source 1..20: mol_type = other DNA
ctgatggcaacttcaactgg

SEQ ID NO: 496 - DNA, 20 bp, synthetic construct
  source 1..20: mol_type = other DNA
aactggggccgggttgttgc

SEQ ID NO: 497 - DNA, 20 bp, synthetic construct
  source 1..20: mol_type = other DNA
ttgcccttttctactttgct

SEQ ID NO: 498 - DNA, 20 bp, synthetic construct
  source 1..20: mol_type = other DNA
cccttttctactttgctagc

SEQ ID NO: 499 - DNA, 20 bp, synthetic construct
  source 1..20: mol_type = other DNA
ctagcaaagtagaaaagggc

SEQ ID NO: 500 - DNA, 20 bp, synthetic construct
  source 1..20: mol_type = other DNA
gctagcaaagtagaaaaggg

SEQ ID NO: 501 - DNA, 20 bp, synthetic construct
  source 1..20: mol_type = other DNA
tctactttgctagcaaactg

SEQ ID NO: 502 - DNA, 20 bp, synthetic construct
  source 1..20: mol_type = other DNA
ctactttgctagcaaactgg

SEQ ID NO: 503 - DNA, 20 bp, synthetic construct
  source 1..20: mol_type = other DNA
tactttgctagcaaactggt

SEQ ID NO: 504 - DNA, 20 bp, synthetic construct
  source 1..20: mol_type = other DNA
gctagcaaactggtgctcaa

SEQ ID NO: 505 - DNA, 20 bp, synthetic construct
  source 1..20: mol_type = other DNA
ctagcaaactggtgctcaag

SEQ ID NO: 506 - DNA, 20 bp, synthetic construct
  source 1..20: mol_type = other DNA
agcaccagtttgctagcaaa

SEQ ID NO: 507 - DNA, 20 bp, synthetic construct
  source 1..20: mol_type = other DNA
ccactttgtcagtgcgtctg

SEQ ID NO: 508 - DNA, 20 bp, synthetic construct
  source 1..20: mol_type = other DNA
ctcaatgggatggaaggctg

SEQ ID NO: 509 - DNA, 20 bp, synthetic construct
  source 1..20: mol_type = other DNA
aggaatacatggtacacgtt

SEQ ID NO: 510 - DNA, 20 bp, synthetic construct
  source 1..20: mol_type = other DNA
aagaacattttcagcttctc

SEQ ID NO: 511 - DNA, 20 bp, synthetic construct
  source 1..20: mol_type = other DNA
atccactttcattctgcgtt

SEQ ID NO: 512 - DNA, 20 bp, synthetic construct
  source 1..20: mol_type = other DNA
tttgttaaaggaggcaaaga

SEQ ID NO: 513 - DNA, 20 bp, synthetic construct
  source 1..20: mol_type = other DNA
tccccagagtccatgtcaga

SEQ ID NO: 514 - DNA, 20 bp, synthetic construct
  source 1..20: mol_type = other DNA
tcagtgcgtctgacatggac

SEQ ID NO: 515 - DNA, 20 bp, synthetic construct
  source 1..20: mol_type = other DNA
gtcagtgcgtctgacatgga

SEQ ID NO: 516 - DNA, 20 bp, synthetic construct
  source 1..20: mol_type = other DNA
ccactttgtcagtgcgtctg

SEQ ID NO: 517 - DNA, 20 bp, synthetic construct
  source 1..20: mol_type = other DNA
tgttcccactttgtcagtgc

SEQ ID NO: 518 - DNA, 20 bp, synthetic construct
  source 1..20: mol_type = other DNA
ctcaatgggatggaaggctg

SEQ ID NO: 519 - DNA, 20 bp, synthetic construct
  source 1..20: mol_type = other DNA
catcccattgaggaatacat

SEQ ID NO: 520 - DNA, 20 bp, synthetic construct
  source 1..20: mol_type = other DNA
aggaatacatggtacacgtt

SEQ ID NO: 521 - DNA, 20 bp, synthetic construct
  source 1..20: mol_type = other DNA
aacgtgtaccatgtattcct

SEQ ID NO: 522 - DNA, 20 bp, synthetic construct
  source 1..20: mol_type = other DNA
ttcaacgtgtaccatgtatt

SEQ ID NO: 523 - DNA, 20 bp, synthetic construct
  source 1..20: mol_type = other DNA
aagaacattttcagcttctc

SEQ ID NO: 524 - DNA, 20 bp, synthetic construct
  source 1..20: mol_type = other DNA
gagaagctgaaaatgttctt

SEQ ID NO: 525 - DNA, 20 bp, synthetic construct
  source 1..20: mol_type = other DNA
tcagcttctcgaacgcagaa

SEQ ID NO: 526 - DNA, 20 bp, synthetic construct
  source 1..20: mol_type = other DNA
cagcttctcgaacgcagaat

SEQ ID NO: 527 - DNA, 20 bp, synthetic construct
  source 1..20: mol_type = other DNA
tgcgttcgagaagctgaaaa

SEQ ID NO: 528 - DNA, 20 bp, synthetic construct
  source 1..20: mol_type = other DNA
agcttctcgaacgcagaatg

SEQ ID NO: 529 - DNA, 20 bp, synthetic construct
  source 1..20: mol_type = other DNA
attctgcgttcgagaagctg

SEQ ID NO: 530 - DNA, 20 bp, synthetic construct
  source 1..20: mol_type = other DNA
cattctgcgttcgagaagct

SEQ ID NO: 531 - DNA, 20 bp, synthetic construct
  source 1..20: mol_type = other DNA
tcgaacgcagaatgaaagtg

SEQ ID NO: 532 - DNA, 20 bp, synthetic construct
  source 1..20: mol_type = other DNA
atccactttcattctgcgtt

SEQ ID NO: 533 - DNA, 20 bp, synthetic construct
  source 1..20: mol_type = other DNA
tatccactttcattctgcgt

SEQ ID NO: 534 - DNA, 20 bp, synthetic construct
  source 1..20: mol_type = other DNA
ttatccactttcattctgcg

SEQ ID NO: 535 - DNA, 20 bp, synthetic construct
  source 1..20: mol_type = other DNA
tttatccactttcattctgc

SEQ ID NO: 536 - DNA, 20 bp, synthetic construct
  source 1..20: mol_type = other DNA
ttttatccactttcattctg

SEQ ID NO: 537 - DNA, 20 bp, synthetic construct
  source 1..20: mol_type = other DNA
aacaaagaagggtcatcagt

SEQ ID NO: 538 - DNA, 20 bp, synthetic construct
  source 1..20: mol_type = other DNA
cctcctttaacaaagaaggg

SEQ ID NO: 539 - DNA, 20 bp, synthetic construct
  source 1..20: mol_type = other DNA
gcctcctttaacaaagaagg

SEQ ID NO: 540 - DNA, 20 bp, synthetic construct
  source 1..20: mol_type = other DNA
tttgttaaaggaggcaaaga

SEQ ID NO: 541 - DNA, 20 bp, synthetic construct
  source 1..20: mol_type = other DNA
gttaaaggaggcaaagacaa

SEQ ID NO: 542 - DNA, 20 bp, synthetic construct
  source 1..20: mol_type = other DNA
ttaaaggaggcaaagacaaa

SEQ ID NO: 543 - DNA, 20 bp, synthetic construct
  source 1..20: mol_type = other DNA
tctttgcctcctttaacaaa

SEQ ID NO: 544 - DNA, 20 bp, synthetic construct
  source 1..20: mol_type = other DNA
gtctttgcctcctttaacaa

SEQ ID NO: 545 - DNA, 20 bp, synthetic construct
  source 1..20: mol_type = other DNA
gtctaacttactttgtcttt

SEQ ID NO: 546 - DNA, 20 bp, synthetic construct
  source 1..20: mol_type = other DNA
ttggtctaacttactttgtc

SEQ ID NO: 547 - DNA, 56 bp, synthetic construct
  source 1..56: mol_type = other DNA
ctttcaagactaatagattgctccttacgaggagactggatatctgtgggacaaga

SEQ ID NO: 548 - DNA, 56 bp, synthetic construct
  source 1..56: mol_type = other DNA
ctttcaagactaatagattgctccttacgaggagactcccacagatatccagaacc

SEQ ID NO: 549 - DNA, 56 bp, synthetic construct
  source 1..56: mol_type = other DNA
ctttcaagactaatagattgctccttacgaggagacgagtctctcagctggtacac

SEQ ID NO: 550 - DNA, 56 bp, synthetic construct
  source 1..56: mol_type = other DNA
ctttcaagactaatagattgctccttacgaggagacagagtctctcagctggtaca

SEQ ID NO: 551 - DNA, 56 bp, synthetic construct
  source 1..56: mol_type = other DNA
ctttcaagactaatagattgctccttacgaggagactcactggatttagagtctct

SEQ ID NO: 552 - DNA, 56 bp, synthetic construct
  source 1..56: mol_type = other DNA
ctttcaagactaatagattgctccttacgaggagacagaatcaaaatcggtgaata

SEQ ID NO: 553 - DNA, 56 bp, synthetic construct
  source 1..56: mol_type = other DNA
ctttcaagactaatagattgctccttacgaggagacgagaatcaaaatcggtgaat

SEQ ID NO: 554 - DNA, 56 bp, synthetic construct
  source 1..56: mol_type = other DNA
ctttcaagactaatagattgctccttacgaggagacaccgattttgattctcaaac

SEQ ID NO: 555 - DNA, 56 bp, synthetic construct
  source 1..56: mol_type = other DNA
ctttcaagactaatagattgctccttacgaggagactttgagaatcaaaatcggtg

SEQ ID NO: 556 - DNA, 56 bp, synthetic construct
  source 1..56: mol_type = other DNA
ctttcaagactaatagattgctccttacgaggagacgtttgagaatcaaaatcggt

SEQ ID NO: 557 - DNA, 56 bp, synthetic construct
  source 1..56: mol_type = other DNA
ctttcaagactaatagattgctccttacgaggagactgattctcaaacaaatgtgt

SEQ ID NO: 558 - DNA, 56 bp, synthetic construct
  source 1..56: mol_type = other DNA
ctttcaagactaatagattgctccttacgaggagacgattctcaaacaaatgtgtc

SEQ ID NO: 559 - DNA, 56 bp, synthetic construct
  source 1..56: mol_type = other DNA
ctttcaagactaatagattgctccttacgaggagacattctcaaacaaatgtgtca

SEQ ID NO: 560 - DNA, 56 bp, synthetic construct
  source 1..56: mol_type = other DNA
ctttcaagactaatagattgctccttacgaggagactgacacatttgtttgagaat

SEQ ID NO: 561 - DNA, 56 bp, synthetic construct
  source 1..56: mol_type = other DNA
ctttcaagactaatagattgctccttacgaggagactcaaacaaatgtgtcacaaa

SEQ ID NO: 562 - DNA, 56 bp, synthetic construct
  source 1..56: mol_type = other DNA
ctttcaagactaatagattgctccttacgaggagacgtgacacatttgtttgagaa

SEQ ID NO: 563 - DNA, 56 bp, synthetic construct
  source 1..56: mol_type = other DNA
ctttcaagactaatagattgctccttacgaggagacctttgtgacacatttgtttg

SEQ ID NO: 564 - DNA, 56 bp, synthetic construct
  source 1..56: mol_type = other DNA
ctttcaagactaatagattgctccttacgaggagactgatgtgtatatcacagaca

SEQ ID NO: 565 - DNA, 56 bp, synthetic construct
  source 1..56: mol_type = other DNA
ctttcaagactaatagattgctccttacgaggagactctgtgatatacacatcaga

SEQ ID NO: 566 - DNA, 56 bp, synthetic construct
  source 1..56: mol_type = other DNA
ctttcaagactaatagattgctccttacgaggagacgtctgtgatatacacatcag

SEQ ID NO: 567 - DNA, 56 bp, synthetic construct
  source 1..56: mol_type = other DNA
ctttcaagactaatagattgctccttacgaggagactgtctgtgatatacacatca

SEQ ID NO: 568 - DNA, 56 bp, synthetic construct
  source 1..56: mol_type = other DNA
ctttcaagactaatagattgctccttacgaggagacaagtccatagacctcatgtc

SEQ ID NO: 569 - DNA, 56 bp, synthetic construct
  source 1..56: mol_type = other DNA
ctttcaagactaatagattgctccttacgaggagacctcttgaagtccatagacct

SEQ ID NO: 570 - DNA, 56 bp, synthetic construct
  source 1..56: mol_type = other DNA
ctttcaagactaatagattgctccttacgaggagacaagagcaacagtgctgtggc

SEQ ID NO: 571 - DNA, 56 bp, synthetic construct
  source 1..56: mol_type = other DNA
ctttcaagactaatagattgctccttacgaggagacctccaggccacagcactgtt

SEQ ID NO: 572 - DNA, 56 bp, synthetic construct
  source 1..56: mol_type = other DNA
ctttcaagactaatagattgctccttacgaggagacttgctccaggccacagcact

SEQ ID NO: 573 - DNA, 56 bp, synthetic construct
  source 1..56: mol_type = other DNA
ctttcaagactaatagattgctccttacgaggagacgttgctccaggccacagcac

SEQ ID NO: 574 - DNA, 56 bp, synthetic construct
  source 1..56: mol_type = other DNA
ctttcaagactaatagattgctccttacgaggagaccacatgcaaagtcagatttg

SEQ ID NO: 575 - DNA, 56 bp, synthetic construct
  source 1..56: mol_type = other DNA
ctttcaagactaatagattgctccttacgaggagacgcacatgcaaagtcagattt

SEQ ID NO: 576 - DNA, 56 bp, synthetic construct
  source 1..56: mol_type = other DNA
ctttcaagactaatagattgctccttacgaggagacgcatgtgcaaacgccttcaa

SEQ ID NO: 577 - DNA, 56 bp, synthetic construct
  source 1..56: mol_type = other DNA
ctttcaagactaatagattgctccttacgaggagacaaggcgtttgcacatgcaaa

SEQ ID NO: 578 - DNA, 56 bp, synthetic construct
  source 1..56: mol_type = other DNA
ctttcaagactaatagattgctccttacgaggagaccatgtgcaaacgccttcaac

SEQ ID NO: 579 - DNA, 56 bp, synthetic construct
  source 1..56: mol_type = other DNA
ctttcaagactaatagattgctccttacgaggagacttgaaggcgtttgcacatgc

SEQ ID NO: 580 - DNA, 56 bp, synthetic construct
  source 1..56: mol_type = other DNA
ctttcaagactaatagattgctccttacgaggagacaacaacagcattattccaga

SEQ ID NO: 581 - DNA, 56 bp, synthetic construct
  source 1..56: mol_type = other DNA
ctttcaagactaatagattgctccttacgaggagactggaataatgctgttgttga

SEQ ID NO: 582 - DNA, 56 bp, synthetic construct
  source 1..56: mol_type = other DNA
ctttcaagactaatagattgctccttacgaggagacttccagaagacaccttcttc

SEQ ID NO: 583 - DNA, 56 bp, synthetic construct
  source 1..56: mol_type = other DNA
ctttcaagactaatagattgctccttacgaggagaccagaagacaccttcttcccc

SEQ ID NO: 584 - DNA, 56 bp, synthetic construct
  source 1..56: mol_type = other DNA
ctttcaagactaatagattgctccttacgaggagaccctgggctggggaagaaggt

SEQ ID NO: 585 - DNA, 56 bp, synthetic construct
  source 1..56: mol_type = other DNA
ctttcaagactaatagattgctccttacgaggagacttccccagcccaggtaaggg

SEQ ID NO: 586 - DNA, 56 bp, synthetic construct
  source 1..56: mol_type = other DNA
ctttcaagactaatagattgctccttacgaggagaccccagcccaggtaagggcag

SEQ ID NO: 587 - DNA, 56 bp, synthetic construct
  source 1..56: mol_type = other DNA
ctttcaagactaatagattgctccttacgaggagactaaaaggaaaaacagacatt

SEQ ID NO: 588 - DNA, 56 bp, synthetic construct
  source 1..56: mol_type = other DNA
ctttcaagactaatagattgctccttacgaggagacctaaaaggaaaaacagacat

SEQ ID NO: 589 - DNA, 56 bp, synthetic construct
  source 1..56: mol_type = other DNA
ctttcaagactaatagattgctccttacgaggagacttccttttagaaagttcctg

SEQ ID NO: 590 - DNA, 56 bp, synthetic construct
  source 1..56: mol_type = other DNA
ctttcaagactaatagattgctccttacgaggagactccttttagaaagttcctgt

SEQ ID NO: 591 - DNA, 56 bp, synthetic construct
  source 1..56: mol_type = other DNA
ctttcaagactaatagattgctccttacgaggagacccttttagaaagttcctgtg

SEQ ID NO: 592 - DNA, 56 bp, synthetic construct
  source 1..56: mol_type = other DNA
ctttcaagactaatagattgctccttacgaggagaccttttagaaagttcctgtga

SEQ ID NO: 593 - DNA, 56 bp, synthetic construct
  source 1..56: mol_type = other DNA
ctttcaagactaatagattgctccttacgaggagactagaaagttcctgtgatgtc

SEQ ID NO: 594 - DNA, 56 bp, synthetic construct
  source 1..56: mol_type = other DNA
ctttcaagactaatagattgctccttacgaggagacagaaagttcctgtgatgtca

SEQ ID NO: 595 - DNA, 56 bp, synthetic construct
  source 1..56: mol_type = other DNA
ctttcaagactaatagattgctccttacgaggagacgaaagttcctgtgatgtcaa

SEQ ID NO: 596 - DNA, 56 bp, synthetic construct
  source 1..56: mol_type = other DNA
ctttcaagactaatagattgctccttacgaggagacacatcacaggaactttctaa

SEQ ID NO: 597 - DNA, 56 bp, synthetic construct
  source 1..56: mol_type = other DNA
ctttcaagactaatagattgctccttacgaggagacctgtgatgtcaagctggtcg

SEQ ID NO: 598 - DNA, 56 bp, synthetic construct
  source 1..56: mol_type = other DNA
ctttcaagactaatagattgctccttacgaggagactcgaccagcttgacatcaca

SEQ ID NO: 599 - DNA, 56 bp, synthetic construct
  source 1..56: mol_type = other DNA
ctttcaagactaatagattgctccttacgaggagacctcgaccagcttgacatcac

SEQ ID NO: 600 - DNA, 56 bp, synthetic construct
  source 1..56: mol_type = other DNA
ctttcaagactaatagattgctccttacgaggagactctcgaccagcttgacatca

SEQ ID NO: 601 - DNA, 56 bp, synthetic construct
  source 1..56: mol_type = other DNA
ctttcaagactaatagattgctccttacgaggagacaaagcttttctcgaccagct

SEQ ID NO: 602 - DNA, 56 bp, synthetic construct
  source 1..56: mol_type = other DNA
ctttcaagactaatagattgctccttacgaggagaccaaagcttttctcgaccagc

SEQ ID NO: 603 - DNA, 56 bp, synthetic construct
  source 1..56: mol_type = other DNA
ctttcaagactaatagattgctccttacgaggagaccctgtttcaaagcttttctc

SEQ ID NO: 604 - DNA, 56 bp, synthetic construct
  source 1..56: mol_type = other DNA
ctttcaagactaatagattgctccttacgaggagacgaaacaggtaagacaggggt

SEQ ID NO: 605 - DNA, 56 bp, synthetic construct
  source 1..56: mol_type = other DNA
ctttcaagactaatagattgctccttacgaggagacaaacaggtaagacaggggtc

SEQ ID NO: 606 - DNA, 57 bp, synthetic construct
  source 1..57: mol_type = other DNA
gctggggaccgatcctgattgctcgctgcggcgagactggatatctgtgggacaaga

SEQ ID NO: 607 - DNA, 57 bp, synthetic construct
  source 1..57: mol_type = other DNA
gctggggaccgatcctgattgctcgctgcggcgagactcccacagatatccagaacc

SEQ ID NO: 608 - DNA, 57 bp, synthetic construct
  source 1..57: mol_type = other DNA
gctggggaccgatcctgattgctcgctgcggcgagacgagtctctcagctggtacac

SEQ ID NO: 609 - DNA, 57 bp, synthetic construct
  source 1..57: mol_type = other DNA
gctggggaccgatcctgattgctcgctgcggcgagacagagtctctcagctggtaca

SEQ ID NO: 610 - DNA, 57 bp, synthetic construct
  source 1..57: mol_type = other DNA
gctggggaccgatcctgattgctcgctgcggcgagactcactggatttagagtctct

SEQ ID NO: 611 - DNA, 57 bp, synthetic construct
  source 1..57: mol_type = other DNA
gctggggaccgatcctgattgctcgctgcggcgagacagaatcaaaatcggtgaata

SEQ ID NO: 612 - DNA, 57 bp, synthetic construct
  source 1..57: mol_type = other DNA
gctggggaccgatcctgattgctcgctgcggcgagacgagaatcaaaatcggtgaat

SEQ ID NO: 613 - DNA, 57 bp, synthetic construct
  source 1..57: mol_type = other DNA
gctggggaccgatcctgattgctcgctgcggcgagacaccgattttgattctcaaac

SEQ ID NO: 614 - DNA, 57 bp, synthetic construct
  source 1..57: mol_type = other DNA
gctggggaccgatcctgattgctcgctgcggcgagactttgagaatcaaaatcggtg

SEQ ID NO: 615 - DNA, 57 bp, synthetic construct
  source 1..57: mol_type = other DNA
gctggggaccgatcctgattgctcgctgcggcgagacgtttgagaatcaaaatcggt

SEQ ID NO: 616 - DNA, 57 bp, synthetic construct
  source 1..57: mol_type = other DNA
gctggggaccgatcctgattgctcgctgcggcgagactgattctcaaacaaatgtgt

SEQ ID NO: 617 - DNA, 57 bp, synthetic construct
  source 1..57: mol_type = other DNA
gctggggaccgatcctgattgctcgctgcggcgagacgattctcaaacaaatgtgtc

SEQ ID NO: 618 - DNA, 57 bp, synthetic construct
  source 1..57: mol_type = other DNA
gctggggaccgatcctgattgctcgctgcggcgagacattctcaaacaaatgtgtca

SEQ ID NO: 619 - DNA, 57 bp, synthetic construct
  source 1..57: mol_type = other DNA
gctggggaccgatcctgattgctcgctgcggcgagactgacacatttgtttgagaat

SEQ ID NO: 620 - DNA, 57 bp, synthetic construct
  source 1..57: mol_type = other DNA
gctggggaccgatcctgattgctcgctgcggcgagactcaaacaaatgtgtcacaaa

SEQ ID NO: 621 - DNA, 57 bp, synthetic construct
  source 1..57: mol_type = other DNA
gctggggaccgatcctgattgctcgctgcggcgagacgtgacacatttgtttgagaa

SEQ ID NO: 622 - DNA, 57 bp, synthetic construct
  source 1..57: mol_type = other DNA
gctggggaccgatcctgattgctcgctgcggcgagacctttgtgacacatttgtttg

SEQ ID NO: 623 - DNA, 57 bp, synthetic construct
  source 1..57: mol_type = other DNA
gctggggaccgatcctgattgctcgctgcggcgagactgatgtgtatatcacagaca

SEQ ID NO: 624 - DNA, 57 bp, synthetic construct
  source 1..57: mol_type = other DNA
gctggggaccgatcctgattgctcgctgcggcgagactctgtgatatacacatcaga

SEQ ID NO: 625 - DNA, 57 bp, synthetic construct
  source 1..57: mol_type = other DNA
gctggggaccgatcctgattgctcgctgcggcgagacgtctgtgatatacacatcag

SEQ ID NO: 626 - DNA, 57 bp, synthetic construct
  source 1..57: mol_type = other DNA
gctggggaccgatcctgattgctcgctgcggcgagactgtctgtgatatacacatca

SEQ ID NO: 627 - DNA, 57 bp, synthetic construct
  source 1..57: mol_type = other DNA
gctggggaccgatcctgattgctcgctgcggcgagacaagtccatagacctcatgtc

SEQ ID NO: 628 - DNA, 57 bp, synthetic construct
  source 1..57: mol_type = other DNA
gctggggaccgatcctgattgctcgctgcggcgagacctcttgaagtccatagacct

SEQ ID NO: 629 - DNA, 57 bp, synthetic construct
  source 1..57: mol_type = other DNA
gctggggaccgatcctgattgctcgctgcggcgagacaagagcaacagtgctgtggc

SEQ ID NO: 630 - DNA, 57 bp, synthetic construct
  source 1..57: mol_type = other DNA
gctggggaccgatcctgattgctcgctgcggcgagacctccaggccacagcactgtt

SEQ ID NO: 631 - DNA, 57 bp, synthetic construct
  source 1..57: mol_type = other DNA
gctggggaccgatcctgattgctcgctgcggcgagacttgctccaggccacagcact

SEQ ID NO: 632 - DNA, 57 bp, synthetic construct
  source 1..57: mol_type = other DNA
gctggggaccgatcctgattgctcgctgcggcgagacgttgctccaggccacagcac

SEQ ID NO: 633 - DNA, 57 bp, synthetic construct
  source 1..57: mol_type = other DNA
gctggggaccgatcctgattgctcgctgcggcgagaccacatgcaaagtcagatttg

SEQ ID NO: 634 - DNA, 57 bp, synthetic construct
  source 1..57: mol_type = other DNA
gctggggaccgatcctgattgctcgctgcggcgagacgcacatgcaaagtcagattt

SEQ ID NO: 635 - DNA, 57 bp, synthetic construct
  source 1..57: mol_type = other DNA
gctggggaccgatcctgattgctcgctgcggcgagacgcatgtgcaaacgccttcaa

SEQ ID NO: 636 - DNA, 57 bp, synthetic construct
  source 1..57: mol_type = other DNA
gctggggaccgatcctgattgctcgctgcggcgagacaaggcgtttgcacatgcaaa

SEQ ID NO: 637 - DNA, 57 bp, synthetic construct
  source 1..57: mol_type = other DNA
gctggggaccgatcctgattgctcgctgcggcgagaccatgtgcaaacgccttcaac

SEQ ID NO: 638 - DNA, 57 bp, synthetic construct
  source 1..57: mol_type = other DNA
gctggggaccgatcctgattgctcgctgcggcgagacttgaaggcgtttgcacatgc

SEQ ID NO: 639 - DNA, 57 bp, synthetic construct
  source 1..57: mol_type = other DNA
gctggggaccgatcctgattgctcgctgcggcgagacaacaacagcattattccaga

SEQ ID NO: 640 - DNA, 57 bp, synthetic construct
  source 1..57: mol_type = other DNA
gctggggaccgatcctgattgctcgctgcggcgagactggaataatgctgttgttga

SEQ ID NO: 641 - DNA, 57 bp, synthetic construct
  source 1..57: mol_type = other DNA
gctggggaccgatcctgattgctcgctgcggcgagacttccagaagacaccttcttc

SEQ ID NO: 642 - DNA, 57 bp, synthetic construct
  source 1..57: mol_type = other DNA
gctggggaccgatcctgattgctcgctgcggcgagaccagaagacaccttcttcccc

SEQ ID NO: 643 - DNA, 57 bp, synthetic construct
  source 1..57: mol_type = other DNA
gctggggaccgatcctgattgctcgctgcggcgagaccctgggctggggaagaaggt

SEQ ID NO: 644 - DNA, 57 bp, synthetic construct
  source 1..57: mol_type = other DNA
gctggggaccgatcctgattgctcgctgcggcgagacttccccagcccaggtaaggg

SEQ ID NO: 645 - DNA, 57 bp, synthetic construct
  source 1..57: mol_type = other DNA
gctggggaccgatcctgattgctcgctgcggcgagaccccagcccaggtaagggcag

SEQ ID NO: 646 - DNA, 57 bp, synthetic construct
  source 1..57: mol_type = other DNA
gctggggaccgatcctgattgctcgctgcggcgagactaaaaggaaaaacagacatt

SEQ ID NO: 647 - DNA, 57 bp, synthetic construct
  source 1..57: mol_type = other DNA
gctggggaccgatcctgattgctcgctgcggcgagacctaaaaggaaaaacagacat

SEQ ID NO: 648 - DNA, 57 bp, synthetic construct
  source 1..57: mol_type = other DNA
gctggggaccgatcctgattgctcgctgcggcgagacttccttttagaaagttcctg

SEQ ID NO: 649 - DNA, 57 bp, synthetic construct
  source 1..57: mol_type = other DNA
gctggggaccgatcctgattgctcgctgcggcgagactccttttagaaagttcctgt

SEQ ID NO: 650 - DNA, 57 bp, synthetic construct
  source 1..57: mol_type = other DNA
gctggggaccgatcctgattgctcgctgcggcgagacccttttagaaagttcctgtg

SEQ ID NO: 651 - DNA, 57 bp, synthetic construct
  source 1..57: mol_type = other DNA
gctggggaccgatcctgattgctcgctgcggcgagaccttttagaaagttcctgtga

SEQ ID NO: 652 - DNA, 57 bp, synthetic construct
  source 1..57: mol_type = other DNA
gctggggaccgatcctgattgctcgctgcggcgagactagaaagttcctgtgatgtc

SEQ ID NO: 653 - DNA, 57 bp, synthetic construct
  source 1..57: mol_type = other DNA
gctggggaccgatcctgattgctcgctgcggcgagacagaaagttcctgtgatgtca

SEQ ID NO: 654 - DNA, 57 bp, synthetic construct
  source 1..57: mol_type = other DNA
gctggggaccgatcctgattgctcgctgcggcgagacgaaagttcctgtgatgtcaa

SEQ ID NO: 655 - DNA, 57 bp, synthetic construct
  source 1..57: mol_type = other DNA
gctggggaccgatcctgattgctcgctgcggcgagacacatcacaggaactttctaa

SEQ ID NO: 656 - DNA, 57 bp, synthetic construct
  source 1..57: mol_type = other DNA
gctggggaccgatcctgattgctcgctgcggcgagacctgtgatgtcaagctggtcg

SEQ ID NO: 657 - DNA, 57 bp, synthetic construct
  source 1..57: mol_type = other DNA
gctggggaccgatcctgattgctcgctgcggcgagactcgaccagcttgacatcaca

SEQ ID NO: 658 - DNA, 57 bp, synthetic construct
  source 1..57: mol_type = other DNA
gctggggaccgatcctgattgctcgctgcggcgagacctcgaccagcttgacatcac

SEQ ID NO: 659 - DNA, 57 bp, synthetic construct
  source 1..57: mol_type = other DNA
gctggggaccgatcctgattgctcgctgcggcgagactctcgaccagcttgacatca

SEQ ID NO: 660 - DNA, 57 bp, synthetic construct
  source 1..57: mol_type = other DNA
gctggggaccgatcctgattgctcgctgcggcgagacaaagcttttctcgaccagct

SEQ ID NO: 661 - DNA, 57 bp, synthetic construct
  source 1..57: mol_type = other DNA
gctggggaccgatcctgattgctcgctgcggcgagaccaaagcttttctcgaccagc

SEQ ID NO: 662 - DNA, 57 bp, synthetic construct
  source 1..57: mol_type = other DNA
gctggggaccgatcctgattgctcgctgcggcgagaccctgtttcaaagcttttctc

SEQ ID NO: 663 - DNA, 57 bp, synthetic construct
  source 1..57: mol_type = other DNA
gctggggaccgatcctgattgctcgctgcggcgagacgaaacaggtaagacaggggt

SEQ ID NO: 664 - DNA, 57 bp, synthetic construct
  source 1..57: mol_type = other DNA
gctggggaccgatcctgattgctcgctgcggcgagacaaacaggtaagacaggggtc

SEQ ID NO: 665 - DNA, 56 bp, synthetic construct
  source 1..56: mol_type = other DNA
ctttcaagactaatagattgctccttacgaggagacaatataagtggaggcgtcgc

SEQ ID NO: 666 - DNA, 56 bp, synthetic construct
  source 1..56: mol_type = other DNA
ctttcaagactaatagattgctccttacgaggagacatataagtggaggcgtcgcg

SEQ ID NO: 667 - DNA, 56 bp, synthetic construct
  source 1..56: mol_type = other DNA
ctttcaagactaatagattgctccttacgaggagacaggaatgcccgccagcgcga

SEQ ID NO: 668 - DNA, 56 bp, synthetic construct
  source 1..56: mol_type = other DNA
ctttcaagactaatagattgctccttacgaggagacctgaagctgacagcattcgg

SEQ ID NO: 669 - DNA, 56 bp, synthetic construct
  source 1..56: mol_type = other DNA
ctttcaagactaatagattgctccttacgaggagacgggccgagatgtctcgctcc

SEQ ID NO: 670 - DNA, 56 bp, synthetic construct
  source 1..56: mol_type = other DNA
ctttcaagactaatagattgctccttacgaggagacgctgtgctcgcgctactctc

SEQ ID NO: 671 - DNA, 56 bp, synthetic construct
  source 1..56: mol_type = other DNA
ctttcaagactaatagattgctccttacgaggagacctggcctggaggctatccag

SEQ ID NO: 672 - DNA, 56 bp, synthetic construct
  source 1..56: mol_type = other DNA
ctttcaagactaatagattgctccttacgaggagactggcctggaggctatccagc

SEQ ID NO: 673 - DNA, 56 bp, synthetic construct
  source 1..56: mol_type = other DNA
ctttcaagactaatagattgctccttacgaggagacatgtgtcttttcccgatatt

SEQ ID NO: 674 - DNA, 56 bp, synthetic construct
  source 1..56: mol_type = other DNA
ctttcaagactaatagattgctccttacgaggagactcccgatattcctcaggtac

SEQ ID NO: 675 - DNA, 56 bp, synthetic construct
  source 1..56: mol_type = other DNA
ctttcaagactaatagattgctccttacgaggagaccccgatattcctcaggtact

SEQ ID NO: 676 - DNA, 56 bp, synthetic construct
  source 1..56: mol_type = other DNA
ctttcaagactaatagattgctccttacgaggagacccgatattcctcaggtactc

SEQ ID NO: 677 - DNA, 56 bp, synthetic construct
  source 1..56: mol_type = other DNA
ctttcaagactaatagattgctccttacgaggagacgagtacctgaggaatatcgg

SEQ ID NO: 678 - DNA, 56 bp, synthetic construct
  source 1..56: mol_type = other DNA
ctttcaagactaatagattgctccttacgaggagacggagtacctgaggaatatcg

SEQ ID NO: 679 - DNA, 56 bp, synthetic construct
  source 1..56: mol_type = other DNA
ctttcaagactaatagattgctccttacgaggagacctcaggtactccaaagattc

SEQ ID NO: 680 - DNA, 56 bp, synthetic construct
  source 1..56: mol_type = other DNA
ctttcaagactaatagattgctccttacgaggagacaggtttactcacgtcatcca

SEQ ID NO: 681 - DNA, 56 bp, synthetic construct
  source 1..56: mol_type = other DNA
ctttcaagactaatagattgctccttacgaggagacactcacgtcatccagcagag

SEQ ID NO: 682 - DNA, 56 bp, synthetic construct
  source 1..56: mol_type = other DNA
ctttcaagactaatagattgctccttacgaggagacctcacgtcatccagcagaga

SEQ ID NO: 683 - DNA, 56 bp, synthetic construct
  source 1..56: mol_type = other DNA
ctttcaagactaatagattgctccttacgaggagactctgctggatgacgtgagta

SEQ ID NO: 684 - DNA, 56 bp, synthetic construct
  source 1..56: mol_type = other DNA
ctttcaagactaatagattgctccttacgaggagaccattctctgctggatgacgt

SEQ ID NO: 685 - DNA, 56 bp, synthetic construct
  source 1..56: mol_type = other DNA
ctttcaagactaatagattgctccttacgaggagacccattctctgctggatgacg

SEQ ID NO: 686 - DNA, 56 bp, synthetic construct
  source 1..56: mol_type = other DNA
ctttcaagactaatagattgctccttacgaggagacactttccattctctgctgga

SEQ ID NO: 687 - DNA, 56 bp, synthetic construct
  source 1..56: mol_type = other DNA
ctttcaagactaatagattgctccttacgaggagacgactttccattctctgctgg

SEQ ID NO: 688 - DNA, 56 bp, synthetic construct
  source 1..56: mol_type = other DNA
ctttcaagactaatagattgctccttacgaggagacaggaaatttgactttccatt

SEQ ID NO: 689 - DNA, 56 bp, synthetic construct
  source 1..56: mol_type = other DNA
ctttcaagactaatagattgctccttacgaggagaccctgaattgctatgtgtctg

SEQ ID NO: 690 - DNA, 56 bp, synthetic construct
  source 1..56: mol_type = other DNA
ctttcaagactaatagattgctccttacgaggagacctgaattgctatgtgtctgg

SEQ ID NO: 691 - DNA, 56 bp, synthetic construct
  source 1..56: mol_type = other DNA
ctttcaagactaatagattgctccttacgaggagacctatgtgtctgggtttcatc

SEQ ID NO: 692 - DNA, 56 bp, synthetic construct
  source 1..56: mol_type = other DNA
ctttcaagactaatagattgctccttacgaggagacaatgtcggatggatgaaacc

SEQ ID NO: 693 - DNA, 56 bp, synthetic construct
  source 1..56: mol_type = other DNA
ctttcaagactaatagattgctccttacgaggagaccatccatccgacattgaagt

SEQ ID NO: 694 - DNA, 56 bp, synthetic construct
  source 1..56: mol_type = other DNA
ctttcaagactaatagattgctccttacgaggagacatccatccgacattgaagtt

SEQ ID NO: 695 - DNA, 56 bp, synthetic construct
  source 1..56: mol_type = other DNA
ctttcaagactaatagattgctccttacgaggagacagtaagtcaacttcaatgtc

SEQ ID NO: 696 - DNA, 56 bp, synthetic construct
  source 1..56: mol_type = other DNA
ctttcaagactaatagattgctccttacgaggagacttcagtaagtcaacttcaat

SEQ ID NO: 697 - DNA, 56 bp, synthetic construct
  source 1..56: mol_type = other DNA
ctttcaagactaatagattgctccttacgaggagacaagttgacttactgaagaat

SEQ ID NO: 698 - DNA, 56 bp, synthetic construct
  source 1..56: mol_type = other DNA
ctttcaagactaatagattgctccttacgaggagacacttactgaagaatggagag

SEQ ID NO: 699 - DNA, 56 bp, synthetic construct
  source 1..56: mol_type = other DNA
ctttcaagactaatagattgctccttacgaggagactctctccattcttcagtaag

SEQ ID NO: 700 - DNA, 56 bp, synthetic construct
  source 1..56: mol_type = other DNA
ctttcaagactaatagattgctccttacgaggagacctgaagaatggagagagaat

SEQ ID NO: 701 - DNA, 56 bp, synthetic construct
  source 1..56: mol_type = other DNA
ctttcaagactaatagattgctccttacgaggagacaattctctctccattcttca

SEQ ID NO: 702 - DNA, 56 bp, synthetic construct
  source 1..56: mol_type = other DNA
ctttcaagactaatagattgctccttacgaggagaccaattctctctccattcttc

SEQ ID NO: 703 - DNA, 56 bp, synthetic construct
  source 1..56: mol_type = other DNA
ctttcaagactaatagattgctccttacgaggagactcaattctctctccattctt

SEQ ID NO: 704 - DNA, 56 bp, synthetic construct
  source 1..56: mol_type = other DNA
ctttcaagactaatagattgctccttacgaggagacttcaattctctctccattct

SEQ ID NO: 705 - DNA, 56 bp, synthetic construct
  source 1..56: mol_type = other DNA
ctttcaagactaatagattgctccttacgaggagacaaaaagtggagcattcagac

SEQ ID NO: 706 - DNA, 56 bp, synthetic construct
  source 1..56: mol_type = other DNA
ctttcaagactaatagattgctccttacgaggagacctgaaagacaagtctgaatg

SEQ ID NO: 707 - DNA, 56 bp, synthetic construct
  source 1..56: mol_type = other DNA
ctttcaagactaatagattgctccttacgaggagacagacttgtctttcagcaagg

SEQ ID NO: 708 - DNA, 56 bp, synthetic construct
  source 1..56: mol_type = other DNA
ctttcaagactaatagattgctccttacgaggagactctttcagcaaggactggtc

SEQ ID NO: 709 - DNA, 56 bp, synthetic construct
  source 1..56: mol_type = other DNA
ctttcaagactaatagattgctccttacgaggagaccagcaaggactggtctttct

SEQ ID NO: 710 - DNA, 56 bp, synthetic construct
  source 1..56: mol_type = other DNA
ctttcaagactaatagattgctccttacgaggagacagcaaggactggtctttcta

SEQ ID NO: 711 - DNA, 56 bp, synthetic construct
  source 1..56: mol_type = other DNA
ctttcaagactaatagattgctccttacgaggagacctatctcttgtactacactg

SEQ ID NO: 712 - DNA, 56 bp, synthetic construct
  source 1..56: mol_type = other DNA
ctttcaagactaatagattgctccttacgaggagactatctcttgtactacactga

SEQ ID NO: 713 - DNA, 56 bp, synthetic construct
  source 1..56: mol_type = other DNA
ctttcaagactaatagattgctccttacgaggagacagtgtagtacaagagataga

SEQ ID NO: 714 - DNA, 56 bp, synthetic construct
  source 1..56: mol_type = other DNA
ctttcaagactaatagattgctccttacgaggagactactacactgaattcacccc

SEQ ID NO: 715 - DNA, 56 bp, synthetic construct
  source 1..56: mol_type = other DNA
ctttcaagactaatagattgctccttacgaggagacagtgggggtgaattcagtgt

SEQ ID NO: 716 - DNA, 56 bp, synthetic construct
  source 1..56: mol_type = other DNA
ctttcaagactaatagattgctccttacgaggagaccagtgggggtgaattcagtg

SEQ ID NO: 717 - DNA, 56 bp, synthetic construct
  source 1..56: mol_type = other DNA
ctttcaagactaatagattgctccttacgaggagactcagtgggggtgaattcagt

SEQ ID NO: 718 - DNA, 56 bp, synthetic construct
  source 1..56: mol_type = other DNA
ctttcaagactaatagattgctccttacgaggagacttcagtgggggtgaattcag

SEQ ID NO: 719 - DNA, 56 bp, synthetic construct
  source 1..56: mol_type = other DNA
ctttcaagactaatagattgctccttacgaggagacacccccactgaaaaagatga

SEQ ID NO: 720 - DNA, 56 bp, synthetic construct
  source 1..56: mol_type = other DNA
ctttcaagactaatagattgctccttacgaggagacacacggcaggcatactcatc

SEQ ID NO: 721 - DNA, 56 bp, synthetic construct
  source 1..56: mol_type = other DNA
ctttcaagactaatagattgctccttacgaggagacggctgtgacaaagtcacatg

SEQ ID NO: 722 - DNA, 56 bp, synthetic construct
  source 1..56: mol_type = other DNA
ctttcaagactaatagattgctccttacgaggagacgtcacagcccaagatagtta

SEQ ID NO: 723 - DNA, 56 bp, synthetic construct
  source 1..56: mol_type = other DNA
ctttcaagactaatagattgctccttacgaggagactcacagcccaagatagttaa

SEQ ID NO: 724 - DNA, 56 bp, synthetic construct
  source 1..56: mol_type = other DNA
ctttcaagactaatagattgctccttacgaggagacactatcttgggctgtgacaa

SEQ ID NO: 725 - DNA, 56 bp, synthetic construct
  source 1..56: mol_type = other DNA
ctttcaagactaatagattgctccttacgaggagacccccacttaactatcttggg

SEQ ID NO: 726 - DNA, 57 bp, synthetic construct
  source 1..57: mol_type = other DNA
gctggggaccgatcctgattgctcgctgcggcgagacaatataagtggaggcgtcgc

SEQ ID NO: 727 - DNA, 57 bp, synthetic construct
  source 1..57: mol_type = other DNA
gctggggaccgatcctgattgctcgctgcggcgagacatataagtggaggcgtcgcg

SEQ ID NO: 728 - DNA, 57 bp, synthetic construct
  source 1..57: mol_type = other DNA
gctggggaccgatcctgattgctcgctgcggcgagacaggaatgcccgccagcgcga

SEQ ID NO: 729 - DNA, 57 bp, synthetic construct
  source 1..57: mol_type = other DNA
gctggggaccgatcctgattgctcgctgcggcgagacctgaagctgacagcattcgg

SEQ ID NO: 730 - DNA, 57 bp, synthetic construct
  source 1..57: mol_type = other DNA
gctggggaccgatcctgattgctcgctgcggcgagacgggccgagatgtctcgctcc

SEQ ID NO: 731 - DNA, 57 bp, synthetic construct
  source 1..57: mol_type = other DNA
gctggggaccgatcctgattgctcgctgcggcgagacgctgtgctcgcgctactctc

SEQ ID NO: 732 - DNA, 57 bp, synthetic construct
  source 1..57: mol_type = other DNA
gctggggaccgatcctgattgctcgctgcggcgagacctggcctggaggctatccag

SEQ ID NO: 733 - DNA, 57 bp, synthetic construct
  source 1..57: mol_type = other DNA
gctggggaccgatcctgattgctcgctgcggcgagactggcctggaggctatccagc

SEQ ID NO: 734 - DNA, 57 bp, synthetic construct
  source 1..57: mol_type = other DNA
gctggggaccgatcctgattgctcgctgcggcgagacatgtgtcttttcccgatatt

SEQ ID NO: 735 - DNA, 57 bp, synthetic construct
  source 1..57: mol_type = other DNA
gctggggaccgatcctgattgctcgctgcggcgagactcccgatattcctcaggtac

SEQ ID NO: 736 - DNA, 57 bp, synthetic construct
  source 1..57: mol_type = other DNA
gctggggaccgatcctgattgctcgctgcggcgagaccccgatattcctcaggtact

SEQ ID NO: 737 - DNA, 57 bp, synthetic construct
  source 1..57: mol_type = other DNA
gctggggaccgatcctgattgctcgctgcggcgagacccgatattcctcaggtactc

SEQ ID NO: 738 - DNA, 57 bp, synthetic construct
  source 1..57: mol_type = other DNA
gctggggaccgatcctgattgctcgctgcggcgagacgagtacctgaggaatatcgg

SEQ ID NO: 739 - DNA, 57 bp, synthetic construct
  source 1..57: mol_type = other DNA
gctggggaccgatcctgattgctcgctgcggcgagacggagtacctgaggaatatcg

SEQ ID NO: 740 - DNA, 57 bp, synthetic construct
  source 1..57: mol_type = other DNA
gctggggaccgatcctgattgctcgctgcggcgagacctcaggtactccaaagattc

SEQ ID NO: 741 - DNA, 57 bp, synthetic construct
  source 1..57: mol_type = other DNA
gctggggaccgatcctgattgctcgctgcggcgagacaggtttactcacgtcatcca

SEQ ID NO: 742 - DNA, 57 bp, synthetic construct
  source 1..57: mol_type = other DNA
gctggggaccgatcctgattgctcgctgcggcgagacactcacgtcatccagcagag

SEQ ID NO: 743 - DNA, 57 bp, synthetic construct
  source 1..57: mol_type = other DNA
gctggggaccgatcctgattgctcgctgcggcgagacctcacgtcatccagcagaga

SEQ ID NO: 744 - DNA, 57 bp, synthetic construct
  source 1..57: mol_type = other DNA
gctggggaccgatcctgattgctcgctgcggcgagactctgctggatgacgtgagta

SEQ ID NO: 745 - DNA, 57 bp, synthetic construct
  source 1..57: mol_type = other DNA
gctggggaccgatcctgattgctcgctgcggcgagaccattctctgctggatgacgt

SEQ ID NO: 746 - DNA, 57 bp, synthetic construct
  source 1..57: mol_type = other DNA
gctggggaccgatcctgattgctcgctgcggcgagacccattctctgctggatgacg

SEQ ID NO: 747 - DNA, 57 bp, synthetic construct
  source 1..57: mol_type = other DNA
gctggggaccgatcctgattgctcgctgcggcgagacactttccattctctgctgga

SEQ ID NO: 748 - DNA, 57 bp, synthetic construct
  source 1..57: mol_type = other DNA
gctggggaccgatcctgattgctcgctgcggcgagacgactttccattctctgctgg

SEQ ID NO: 749 - DNA, 57 bp, synthetic construct
  source 1..57: mol_type = other DNA
gctggggaccgatcctgattgctcgctgcggcgagacaggaaatttgactttccatt

SEQ ID NO: 750 - DNA, 57 bp, synthetic construct
  source 1..57: mol_type = other DNA
gctggggaccgatcctgattgctcgctgcggcgagaccctgaattgctatgtgtctg

SEQ ID NO: 751 - DNA, 57 bp, synthetic construct
  source 1..57: mol_type = other DNA
gctggggaccgatcctgattgctcgctgcggcgagacctgaattgctatgtgtctgg

SEQ ID NO: 752 - DNA, 57 bp, synthetic construct
  source 1..57: mol_type = other DNA
gctggggaccgatcctgattgctcgctgcggcgagacctatgtgtctgggtttcatc

SEQ ID NO: 753 - DNA, 57 bp, synthetic construct
  source 1..57: mol_type = other DNA
gctggggaccgatcctgattgctcgctgcggcgagacaatgtcggatggatgaaacc

SEQ ID NO: 754 - DNA, 57 bp, synthetic construct
  source 1..57: mol_type = other DNA
gctggggaccgatcctgattgctcgctgcggcgagaccatccatccgacattgaagt

SEQ ID NO: 755 - DNA, 57 bp, synthetic construct
  source 1..57: mol_type = other DNA
gctggggaccgatcctgattgctcgctgcggcgagacatccatccgacattgaagtt

SEQ ID NO: 756 - DNA, 57 bp, synthetic construct
  source 1..57: mol_type = other DNA
gctggggaccgatcctgattgctcgctgcggcgagacagtaagtcaacttcaatgtc

SEQ ID NO: 757 - DNA, 57 bp, synthetic construct
  source 1..57: mol_type = other DNA
gctggggaccgatcctgattgctcgctgcggcgagacttcagtaagtcaacttcaat

SEQ ID NO: 758 - DNA, 57 bp, synthetic construct
  source 1..57: mol_type = other DNA
gctggggaccgatcctgattgctcgctgcggcgagacaagttgacttactgaagaat

SEQ ID NO: 759 - DNA, 57 bp, synthetic construct
  source 1..57: mol_type = other DNA
gctggggaccgatcctgattgctcgctgcggcgagacacttactgaagaatggagag

SEQ ID NO: 760 - DNA, 57 bp, synthetic construct
  source 1..57: mol_type = other DNA
gctggggaccgatcctgattgctcgctgcggcgagactctctccattcttcagtaag

SEQ ID NO: 761 - DNA, 57 bp, synthetic construct
  source 1..57: mol_type = other DNA
gctggggaccgatcctgattgctcgctgcggcgagacctgaagaatggagagagaat

SEQ ID NO: 762 - DNA, 57 bp, synthetic construct
  source 1..57: mol_type = other DNA
gctggggaccgatcctgattgctcgctgcggcgagacaattctctctccattcttca

SEQ ID NO: 763 - DNA, 57 bp, synthetic construct
  source 1..57: mol_type = other DNA
gctggggaccgatcctgattgctcgctgcggcgagaccaattctctctccattcttc

SEQ ID NO: 764 - DNA, 57 bp, synthetic construct
  source 1..57: mol_type = other DNA
gctggggaccgatcctgattgctcgctgcggcgagactcaattctctctccattctt

SEQ ID NO: 765 - DNA, 57 bp, synthetic construct
  source 1..57: mol_type = other DNA
gctggggaccgatcctgattgctcgctgcggcgagacttcaattctctctccattct

SEQ ID NO: 766 - DNA, 57 bp, synthetic construct
  source 1..57: mol_type = other DNA
gctggggaccgatcctgattgctcgctgcggcgagacaaaaagtggagcattcagac

SEQ ID NO: 767 - DNA, 57 bp, synthetic construct
  source 1..57: mol_type = other DNA
gctggggaccgatcctgattgctcgctgcggcgagacctgaaagacaagtctgaatg

SEQ ID NO: 768 - DNA, 57 bp, synthetic construct
  source 1..57: mol_type = other DNA
gctggggaccgatcctgattgctcgctgcggcgagacagacttgtctttcagcaagg

SEQ ID NO: 769 - DNA, 57 bp, synthetic construct
  source 1..57: mol_type = other DNA
gctggggaccgatcctgattgctcgctgcggcgagactctttcagcaaggactggtc

SEQ ID NO: 770 - DNA, 57 bp, synthetic construct
  source 1..57: mol_type = other DNA
gctggggaccgatcctgattgctcgctgcggcgagaccagcaaggactggtctttct

SEQ ID NO: 771 - DNA, 57 bp, synthetic construct
  source 1..57: mol_type = other DNA
gctggggaccgatcctgattgctcgctgcggcgagacagcaaggactggtctttcta

SEQ ID NO: 772 - DNA, 57 bp, synthetic construct
  source 1..57: mol_type = other DNA
gctggggaccgatcctgattgctcgctgcggcgagacctatctcttgtactacactg

SEQ ID NO: 773 - DNA, 57 bp, synthetic construct
  source 1..57: mol_type = other DNA
gctggggaccgatcctgattgctcgctgcggcgagactatctcttgtactacactga

SEQ ID NO: 774 - DNA, 57 bp, synthetic construct
  source 1..57: mol_type = other DNA
gctggggaccgatcctgattgctcgctgcggcgagacagtgtagtacaagagataga

SEQ ID NO: 775 - DNA, 57 bp, synthetic construct
  source 1..57: mol_type = other DNA
gctggggaccgatcctgattgctcgctgcggcgagactactacactgaattcacccc

SEQ ID NO: 776 - DNA, 57 bp, synthetic construct
  source 1..57: mol_type = other DNA
gctggggaccgatcctgattgctcgctgcggcgagacagtgggggtgaattcagtgt

SEQ ID NO: 777 - DNA, 57 bp, synthetic construct
  source 1..57: mol_type = other DNA
gctggggaccgatcctgattgctcgctgcggcgagaccagtgggggtgaattcagtg

SEQ ID NO: 778 - DNA, 57 bp, synthetic construct
  source 1..57: mol_type = other DNA
gctggggaccgatcctgattgctcgctgcggcgagactcagtgggggtgaattcagt

SEQ ID NO: 779 - DNA, 57 bp, synthetic construct
  source 1..57: mol_type = other DNA
gctggggaccgatcctgattgctcgctgcggcgagacttcagtgggggtgaattcag

SEQ ID NO: 780 - DNA, 57 bp, synthetic construct
  source 1..57: mol_type = other DNA
gctggggaccgatcctgattgctcgctgcggcgagacacccccactgaaaaagatga

SEQ ID NO: 781 - DNA, 57 bp, synthetic construct
  source 1..57: mol_type = other DNA
gctggggaccgatcctgattgctcgctgcggcgagacacacggcaggcatactcatc

SEQ ID NO: 782 - DNA, 57 bp, synthetic construct
  source 1..57: mol_type = other DNA
gctggggaccgatcctgattgctcgctgcggcgagacggctgtgacaaagtcacatg

SEQ ID NO: 783 - DNA, 57 bp, synthetic construct
  source 1..57: mol_type = other DNA
gctggggaccgatcctgattgctcgctgcggcgagacgtcacagcccaagatagtta

SEQ ID NO: 784 - DNA, 57 bp, synthetic construct
  source 1..57: mol_type = other DNA
gctggggaccgatcctgattgctcgctgcggcgagactcacagcccaagatagttaa

SEQ ID NO: 785 - DNA, 57 bp, synthetic construct
  source 1..57: mol_type = other DNA
gctggggaccgatcctgattgctcgctgcggcgagacactatcttgggctgtgacaa

SEQ ID NO: 786 - DNA, 57 bp, synthetic construct
  source 1..57: mol_type = other DNA
gctggggaccgatcctgattgctcgctgcggcgagacccccacttaactatcttggg

SEQ ID NO: 787 - RNA, 56 nt, synthetic construct
  source 1..56: mol_type = other RNA
ctttcaagactaatagattgctccttacgaggagacccttccgctcacctccgcct

SEQ ID NO: 788 - RNA, 56 nt, synthetic construct; identical to SEQ ID NO: 787
  source 1..56: mol_type = other RNA

SEQ ID NO: 789 - RNA, 56 nt, synthetic construct
  source 1..56: mol_type = other RNA
ctttcaagactaatagattgctccttacgaggagaccgctcacctccgcctgagca

SEQ ID NO: 790 - RNA, 56 nt, synthetic construct
  source 1..56: mol_type = other RNA
ctttcaagactaatagattgctccttacgaggagactccactgctcaggcggaggt

SEQ ID NO: 791 - RNA, 56 nt, synthetic construct
  source 1..56: mol_type = other RNA
ctttcaagactaatagattgctccttacgaggagactagcaccgcccagacgactg

SEQ ID NO: 792 - RNA, 56 nt, synthetic construct
  source 1..56: mol_type = other RNA
ctttcaagactaatagattgctccttacgaggagacaggcatgcagatcccacagg

SEQ ID NO: 793 - RNA, 56 nt, synthetic construct
  source 1..56: mol_type = other RNA
ctttcaagactaatagattgctccttacgaggagaccacaggcgccctggccagtc

SEQ ID NO: 794 - RNA, 56 nt, synthetic construct
  source 1..56: mol_type = other RNA
ctttcaagactaatagattgctccttacgaggagactctgggcggtgctacaactg

SEQ ID NO: 795 - RNA, 56 nt, synthetic construct
  source 1..56: mol_type = other RNA
ctttcaagactaatagattgctccttacgaggagacgcatgcctggagcagcccca

SEQ ID NO: 796 - RNA, 56 nt, synthetic construct; identical to SEQ ID NO: 791
  source 1..56: mol_type = other RNA

SEQ ID NO: 797 - RNA, 56 nt, synthetic construct
  source 1..56: mol_type = other RNA
ctttcaagactaatagattgctccttacgaggagactggccgccagcccagttgta

SEQ ID NO: 798 - RNA, 56 nt, synthetic construct
  source 1..56: mol_type = other RNA
ctttcaagactaatagattgctccttacgaggagaccttccgctcacctccgcctg

SEQ ID NO: 799 - RNA, 56 nt, synthetic construct
  source 1..56: mol_type = other RNA
ctttcaagactaatagattgctccttacgaggagaccagggcctgtctggggagtc

SEQ ID NO: 800 - RNA, 56 nt, synthetic construct
  source 1..56: mol_type = other RNA
ctttcaagactaatagattgctccttacgaggagactccccagccctgctcgtggt

SEQ ID NO: 801 - RNA, 56 nt, synthetic construct
  source 1..56: mol_type = other RNA
ctttcaagactaatagattgctccttacgaggagacggtcaccacgagcagggctg

SEQ ID NO: 802 - RNA, 56 nt, synthetic construct
  source 1..56: mol_type = other RNA
ctttcaagactaatagattgctccttacgaggagactccccttcggtcaccacgag

SEQ ID NO: 803 - RNA, 56 nt, synthetic construct
  source 1..56: mol_type = other RNA
ctttcaagactaatagattgctccttacgaggagacgagaagctgcaggtgaaggt

SEQ ID NO: 804 - RNA, 56 nt, synthetic construct
  source 1..56: mol_type = other RNA
ctttcaagactaatagattgctccttacgaggagacacctgcagcttctccaacac

SEQ ID NO: 805 - RNA, 56 nt, synthetic construct
  source 1..56: mol_type = other RNA
ctttcaagactaatagattgctccttacgaggagactccaacacatcggagagctt

SEQ ID NO: 806 - RNA, 56 nt, synthetic construct
  source 1..56: mol_type = other RNA
ctttcaagactaatagattgctccttacgaggagacgcacgaagctctccgatgtg

SEQ ID NO: 807 - RNA, 56 nt, synthetic construct
  source 1..56: mol_type = other RNA
ctttcaagactaatagattgctccttacgaggagacagcacgaagctctccgatgt

SEQ ID NO: 808 - RNA, 56 nt, synthetic construct
  source 1..56: mol_type = other RNA
ctttcaagactaatagattgctccttacgaggagacgtgctaaactggtaccgcat

SEQ ID NO: 809 - RNA, 56 nt, synthetic construct
  source 1..56: mol_type = other RNA
ctttcaagactaatagattgctccttacgaggagacctggggctcatgcggtacca

SEQ ID NO: 810 - RNA, 56 nt, synthetic construct
  source 1..56: mol_type = other RNA
ctttcaagactaatagattgctccttacgaggagactccgtctggttgctggggct

SEQ ID NO: 811 - RNA, 56 nt, synthetic construct
  source 1..56: mol_type = other RNA
ctttcaagactaatagattgctccttacgaggagaccccgaggaccgcagccagcc

SEQ ID NO: 812 - RNA, 56 nt, synthetic construct
  source 1..56: mol_type = other RNA
ctttcaagactaatagattgctccttacgaggagactgtgacacggaagcggcagt

SEQ ID NO: 813 - RNA, 56 nt, synthetic construct
  source 1..56: mol_type = other RNA
ctttcaagactaatagattgctccttacgaggagaccgtgtcacacaactgcccaa

SEQ ID NO: 814 - RNA, 56 nt, synthetic construct
  source 1..56: mol_type = other RNA
ctttcaagactaatagattgctccttacgaggagacggcagttgtgtgacacggaa

SEQ ID NO: 815 - RNA, 56 nt, synthetic construct
  source 1..56: mol_type = other RNA
ctttcaagactaatagattgctccttacgaggagaccacatgagcgtggtcagggc

SEQ ID NO: 816 - RNA, 56 nt, synthetic construct
  source 1..56: mol_type = other RNA
ctttcaagactaatagattgctccttacgaggagaccgccgggccctgaccacgct

SEQ ID NO: 817 - RNA, 56 nt, synthetic construct
  source 1..56: mol_type = other RNA
ctttcaagactaatagattgctccttacgaggagacggggccagggagatggcccc

SEQ ID NO: 818 - RNA, 56 nt, synthetic construct
  source 1..56: mol_type = other RNA
ctttcaagactaatagattgctccttacgaggagacatctgcgccttgggggccag

SEQ ID NO: 819 - RNA, 56 nt, synthetic construct
  source 1..56: mol_type = other RNA
ctttcaagactaatagattgctccttacgaggagacgatctgcgccttgggggcca

SEQ ID NO: 820 - RNA, 56 nt, synthetic construct
  source 1..56: mol_type = other RNA
ctttcaagactaatagattgctccttacgaggagacccagacaggccctggaaccc

SEQ ID NO: 821 - RNA, 56 nt, synthetic construct
  source 1..56: mol_type = other RNA
ctttcaagactaatagattgctccttacgaggagacccagccctgctcgtggtgac

SEQ ID NO: 822 - RNA, 56 nt, synthetic construct
  source 1..56: mol_type = other RNA
ctttcaagactaatagattgctccttacgaggagactctctggaagggcacaaagg

SEQ ID NO: 823 - RNA, 56 nt, synthetic construct
  source 1..56: mol_type = other RNA
ctttcaagactaatagattgctccttacgaggagacgtgcccttccagagagaagg

SEQ ID NO: 824 - RNA, 56 nt, synthetic construct
  source 1..56: mol_type = other RNA
ctttcaagactaatagattgctccttacgaggagactgcccttccagagagaaggg

SEQ ID NO: 825 - RNA, 56 nt, synthetic construct
  source 1..56: mol_type = other RNA
ctttcaagactaatagattgctccttacgaggagactgcccttctctctggaaggg

SEQ ID NO: 826 - RNA, 56 nt, synthetic construct
  source 1..56: mol_type = other RNA
ctttcaagactaatagattgctccttacgaggagaccagagagaagggcagaagtg

SEQ ID NO: 827 - RNA, 56 nt, synthetic construct
  source 1..56: mol_type = other RNA
ctttcaagactaatagattgctccttacgaggagacgaactggccggctggcctgg

SEQ ID NO: 828 - RNA, 56 nt, synthetic construct
  source 1..56: mol_type = other RNA
ctttcaagactaatagattgctccttacgaggagacggaactggccggctggcctg

SEQ ID NO: 829 - RNA, 56 nt, synthetic construct
  source 1..56: mol_type = other RNA
ctttcaagactaatagattgctccttacgaggagaccaaaccctggtggttggtgt

SEQ ID NO: 830 - RNA, 56 nt, synthetic construct
  source 1..56: mol_type = other RNA
ctttcaagactaatagattgctccttacgaggagacgtgtcgtgggcggcctgctg

SEQ ID NO: 831 - RNA, 56 nt, synthetic construct
  source 1..56: mol_type = other RNA
ctttcaagactaatagattgctccttacgaggagaccctcgtgcggcccgggagca

SEQ ID NO: 832 - RNA, 56 nt, synthetic construct
  source 1..56: mol_type = other RNA
ctttcaagactaatagattgctccttacgaggagactccctgcagagaaacacact

SEQ ID NO: 833 - RNA, 56 nt, synthetic construct
  source 1..56: mol_type = other RNA
ctttcaagactaatagattgctccttacgaggagacctctgcagggacaataggag

SEQ ID NO: 834 - RNA, 56 nt, synthetic construct
  source 1..56: mol_type = other RNA
ctttcaagactaatagattgctccttacgaggagactctgcagggacaataggagc

SEQ ID NO: 835 - RNA, 56 nt, synthetic construct
  source 1..56: mol_type = other RNA
ctttcaagactaatagattgctccttacgaggagacctcctcaaagaaggaggacc

SEQ ID NO: 836 - RNA, 56 nt, synthetic construct
  source 1..56: mol_type = other RNA
ctttcaagactaatagattgctccttacgaggagactcctcaaagaaggaggaccc

SEQ ID NO: 837 - RNA, 56 nt, synthetic construct
  source 1..56: mol_type = other RNA
ctttcaagactaatagattgctccttacgaggagactctgtggactatggggagct

SEQ ID NO: 838 - RNA, 56 nt, synthetic construct
  source 1..56: mol_type = other RNA
ctttcaagactaatagattgctccttacgaggagactctcgccactggaaatccag

SEQ ID NO: 839 - RNA, 56 nt, synthetic construct
  source 1..56: mol_type = other RNA
ctttcaagactaatagattgctccttacgaggagacccagtggcgagagaagaccc

SEQ ID NO: 840 - RNA, 56 nt, synthetic construct
  source 1..56: mol_type = other RNA
ctttcaagactaatagattgctccttacgaggagaccagtggcgagagaagacccc

SEQ ID NO: 841 - RNA, 56 nt, synthetic construct
  source 1..56: mol_type = other RNA
ctttcaagactaatagattgctccttacgaggagaccgctaggaaagacaatggtg

SEQ ID NO: 842 - RNA, 56 nt, synthetic construct
  source 1..56: mol_type = other RNA
ctttcaagactaatagattgctccttacgaggagactctttcctagcggaatgggc

SEQ ID NO: 843 - RNA, 56 nt, synthetic construct
  source 1..56: mol_type = other RNA
ctttcaagactaatagattgctccttacgaggagaccctagcggaatgggcacctc

SEQ ID NO: 844 - RNA, 56 nt, synthetic construct
  source 1..56: mol_type = other RNA
ctttcaagactaatagattgctccttacgaggagacctagcggaatgggcacctca

SEQ ID NO: 845 - RNA, 56 nt, synthetic construct
  source 1..56: mol_type = other RNA
ctttcaagactaatagattgctccttacgaggagacgcccctctgaccggcttcct

SEQ ID NO: 846 - RNA, 56 nt, synthetic construct
  source 1..56: mol_type = other RNA
ctttcaagactaatagattgctccttacgaggagaccttggccaccagtgttctgc

SEQ ID NO: 847 - RNA, 56 nt, synthetic construct
  source 1..56: mol_type = other RNA
ctttcaagactaatagattgctccttacgaggagacgccaccagtgttctgcagac

SEQ ID NO: 848 - RNA, 56 nt, synthetic construct
  source 1..56: mol_type = other RNA
ctttcaagactaatagattgctccttacgaggagactgcagaccctccaccatgag

SEQ ID NO: 849 - RNA, 56 nt, synthetic construct
  source 1..56: mol_type = other RNA
ctttcaagactaatagattgctccttacgaggagactcctgaggaaatgcgctgac

SEQ ID NO: 850 - RNA, 56 nt, synthetic construct
  source 1..56: mol_type = other RNA
ctttcaagactaatagattgctccttacgaggagaccctcaggagaagcaggcagg

SEQ ID NO: 851 - RNA, 56 nt, synthetic construct
  source 1..56: mol_type = other RNA
ctttcaagactaatagattgctccttacgaggagacctcaggagaagcaggcaggg

SEQ ID NO: 852 - RNA, 56 nt, synthetic construct
  source 1..56: mol_type = other RNA
ctttcaagactaatagattgctccttacgaggagaccaggccgtccaggggctgag

SEQ ID NO: 853 - RNA, 56 nt, synthetic construct
  source 1..56: mol_type = other RNA
ctttcaagactaatagattgctccttacgaggagacagacatgagtcctgtggtgg

SEQ ID NO: 854 - RNA, 56 nt, synthetic construct
  source 1..56: mol_type = other RNA
ctttcaagactaatagattgctccttacgaggagacaggtcctgccagcacagagc

SEQ ID NO: 855 - RNA, 56 nt, synthetic construct
  source 1..56: mol_type = other RNA
ctttcaagactaatagattgctccttacgaggagacagggagctggacgcaggcag

SEQ ID NO: 856 - RNA, 56 nt, synthetic construct
  source 1..56: mol_type = other RNA
ctttcaagactaatagattgctccttacgaggagacagccccgggccgcaggcagc

SEQ ID NO: 857 - RNA, 56 nt, synthetic construct
  source 1..56: mol_type = other RNA
ctttcaagactaatagattgctccttacgaggagacaggcaggaggctccggggcg

SEQ ID NO: 858 - RNA, 56 nt, synthetic construct
  source 1..56: mol_type = other RNA
ctttcaagactaatagattgctccttacgaggagacggggctggttggagatggcc

SEQ ID NO: 859 - RNA, 56 nt, synthetic construct
  source 1..56: mol_type = other RNA
ctttcaagactaatagattgctccttacgaggagacgagatggccttggagcagcc

SEQ ID NO: 860 - RNA, 56 nt, synthetic construct
  source 1..56: mol_type = other RNA
ctttcaagactaatagattgctccttacgaggagacgctgctccaaggccatctcc

SEQ ID NO: 861 - RNA, 56 nt, synthetic construct
  source 1..56: mol_type = other RNA
ctttcaagactaatagattgctccttacgaggagacgagcagccaaggtgcccctg

SEQ ID NO: 862 - RNA, 56 nt, synthetic construct
  source 1..56: mol_type = other RNA
ctttcaagactaatagattgctccttacgaggagacgggatgccactgccaggggc

SEQ ID NO: 863 - RNA, 56 nt, synthetic construct
  source 1..56: mol_type = other RNA
ctttcaagactaatagattgctccttacgaggagaccgggatgccactgccagggg

SEQ ID NO: 864 - RNA, 56 nt, synthetic construct
  source 1..56: mol_type = other RNA
ctttcaagactaatagattgctccttacgaggagacggccctgcgtccagggcgtt

SEQ ID NO: 865 - RNA, 56 nt, synthetic construct
  source 1..56: mol_type = other RNA
ctttcaagactaatagattgctccttacgaggagactctgctccctgcaggcctag

SEQ ID NO: 866 - RNA, 56 nt, synthetic construct
  source 1..56: mol_type = other RNA
ctttcaagactaatagattgctccttacgaggagactctaggcctgcagggagcag

SEQ ID NO: 867 - RNA, 56 nt, synthetic construct
  source 1..56: mol_type = other RNA
ctttcaagactaatagattgctccttacgaggagaccctgaaacttctctaggcct

SEQ ID NO: 868 - RNA, 56 nt, synthetic construct
  source 1..56: mol_type = other RNA
ctttcaagactaatagattgctccttacgaggagactgaccttccctgaaacttct

SEQ ID NO: 869 - RNA, 56 nt, synthetic construct
  source 1..56: mol_type = other RNA
ctttcaagactaatagattgctccttacgaggagaccagggaaggtcagaagagct

SEQ ID NO: 870 - RNA, 56 nt, synthetic construct
  source 1..56: mol_type = other RNA
ctttcaagactaatagattgctccttacgaggagacagggaaggtcagaagagctc

SEQ ID NO: 871 - RNA, 56 nt, synthetic construct
  source 1..56: mol_type = other RNA
ctttcaagactaatagattgctccttacgaggagacctgccctgcccaccacagcc

SEQ ID NO: 872 - RNA, 56 nt, synthetic construct
  source 1..56: mol_type = other RNA
ctttcaagactaatagattgctccttacgaggagaccctgccctgcccaccacagc

SEQ ID NO: 873 - RNA, 56 nt, synthetic construct
  source 1..56: mol_type = other RNA
ctttcaagactaatagattgctccttacgaggagacacacatgcccaggcagcacc

SEQ ID NO: 874 - RNA, 56 nt, synthetic construct
  source 1..56: mol_type = other RNA
ctttcaagactaatagattgctccttacgaggagaccacatgcccaggcagcacct

SEQ ID NO: 875 - RNA, 56 nt, synthetic construct
  source 1..56: mol_type = other RNA
ctttcaagactaatagattgctccttacgaggagaccctgccccacaaagggcctg

SEQ ID NO: 876 - RNA, 56 nt, synthetic construct
  source 1..56: mol_type = other RNA
ctttcaagactaatagattgctccttacgaggagacgtggggcagggaagctgagg

SEQ ID NO: 877 - RNA, 56 nt, synthetic construct
  source 1..56: mol_type = other RNA
ctttcaagactaatagattgctccttacgaggagactggggcagggaagctgaggc

SEQ ID NO: 878 - RNA, 56 nt, synthetic construct
  source 1..56: mol_type = other RNA
ctttcaagactaatagattgctccttacgaggagacctgcctcagcttccctgccc

SEQ ID NO: 879 - RNA, 56 nt, synthetic construct
  source 1..56: mol_type = other RNA
ctttcaagactaatagattgctccttacgaggagaccaggcccagccagcactctg

SEQ ID NO: 880 - RNA, 56 nt, synthetic construct
  source 1..56: mol_type = other RNA
ctttcaagactaatagattgctccttacgaggagacaggcccagccagcactctgg

SEQ ID NO: 881 - RNA, 56 nt, synthetic construct
  source 1..56: mol_type = other RNA
ctttcaagactaatagattgctccttacgaggagaccaccccagcccctcacacca

SEQ ID NO: 882 - RNA, 56 nt, synthetic construct
  source 1..56: mol_type = other RNA
ctttcaagactaatagattgctccttacgaggagacggaccgtaggatgtccctct

SEQ ID NO: 883 - RNA, 57 nt, synthetic construct
  source 1..57: mol_type = other RNA
gctggggaccgatcctgattgctcgctgcggcgagacccttccgctcacctccgcct

SEQ ID NO: 884 - RNA, 57 nt, synthetic construct; identical to SEQ ID NO: 883
  source 1..57: mol_type = other RNA

SEQ ID NO: 885 - RNA, 57 nt, synthetic construct
  source 1..57: mol_type = other RNA
gctggggaccgatcctgattgctcgctgcggcgagaccgctcacctccgcctgagca

SEQ ID NO: 886 - RNA, 57 nt, synthetic construct
  source 1..57: mol_type = other RNA
gctggggaccgatcctgattgctcgctgcggcgagactccactgctcaggcggaggt

SEQ ID NO: 887 - RNA, 57 nt, synthetic construct
  source 1..57: mol_type = other RNA
gctggggaccgatcctgattgctcgctgcggcgagactagcaccgcccagacgactg

SEQ ID NO: 888 - RNA, 57 nt, synthetic construct
  source 1..57: mol_type = other RNA
gctggggaccgatcctgattgctcgctgcggcgagacaggcatgcagatcccacagg

SEQ ID NO: 889 - RNA, 57 nt, synthetic construct
  source 1..57: mol_type = other RNA
gctggggaccgatcctgattgctcgctgcggcgagaccacaggcgccctggccagtc

SEQ ID NO: 890 - RNA, 57 nt, synthetic construct
  source 1..57: mol_type = other RNA
gctggggaccgatcctgattgctcgctgcggcgagactctgggcggtgctacaactg

SEQ ID NO: 891 - RNA, 57 nt, synthetic construct
  source 1..57: mol_type = other RNA
gctggggaccgatcctgattgctcgctgcggcgagacgcatgcctggagcagcccca

SEQ ID NO: 892 - RNA, 57 nt, synthetic construct; identical to SEQ ID NO: 887
  source 1..57: mol_type = other RNA

SEQ ID NO: 893 - RNA, 57 nt, synthetic construct
  source 1..57: mol_type = other RNA
gctggggaccgatcctgattgctcgctgcggcgagactggccgccagcccagttgta

SEQ ID NO: 894 - RNA, 57 nt, synthetic construct
  source 1..57: mol_type = other RNA
gctggggaccgatcctgattgctcgctgcggcgagaccttccgctcacctccgcctg

SEQ ID NO: 895 - RNA, 57 nt, synthetic construct
  source 1..57: mol_type = other RNA
gctggggaccgatcctgattgctcgctgcggcgagaccagggcctgtctggggagtc

SEQ ID NO: 896 - RNA, 57 nt, synthetic construct
  source 1..57: mol_type = other RNA
gctggggaccgatcctgattgctcgctgcggcgagactccccagccctgctcgtggt

SEQ ID NO: 897 - RNA, 57 nt, synthetic construct
  source 1..57: mol_type = other RNA
gctggggaccgatcctgattgctcgctgcggcgagacggtcaccacgagcagggctg

SEQ ID NO: 898 - RNA, 57 nt, synthetic construct
  source 1..57: mol_type = other RNA
gctggggaccgatcctgattgctcgctgcggcgagactccccttcggtcaccacgag

SEQ ID NO: 899 - RNA, 57 nt, synthetic construct
  source 1..57: mol_type = other RNA
gctggggaccgatcctgattgctcgctgcggcgagacgagaagctgcaggtgaaggt

SEQ ID NO: 900 - RNA, 57 nt, synthetic construct
  source 1..57: mol_type = other RNA
gctggggaccgatcctgattgctcgctgcggcgagacacctgcagcttctccaacac

SEQ ID NO: 901 - RNA, 57 nt, synthetic construct
  source 1..57: mol_type = other RNA
gctggggaccgatcctgattgctcgctgcggcgagactccaacacatcggagagctt

SEQ ID NO: 902 - RNA, 57 nt, synthetic construct
  source 1..57: mol_type = other RNA
gctggggaccgatcctgattgctcgctgcggcgagacgcacgaagctctccgatgtg

SEQ ID NO: 903 - RNA, 57 nt, synthetic construct
  source 1..57: mol_type = other RNA
gctggggaccgatcctgattgctcgctgcggcgagacagcacgaagctctccgatgt

SEQ ID NO: 904 - RNA, 57 nt, synthetic construct
  source 1..57: mol_type = other RNA
gctggggaccgatcctgattgctcgctgcggcgagacgtgctaaactggtaccgcat

SEQ ID NO: 905 - RNA, 57 nt, synthetic construct
  source 1..57: mol_type = other RNA
gctggggaccgatcctgattgctcgctgcggcgagacctggggctcatgcggtacca

SEQ ID NO: 906 - RNA, 57 nt, synthetic construct
  source 1..57: mol_type = other RNA
gctggggaccgatcctgattgctcgctgcggcgagactccgtctggttgctggggct

SEQ ID NO: 907 - RNA, 57 nt, synthetic construct
  source 1..57: mol_type = other RNA
gctggggaccgatcctgattgctcgctgcggcgagaccccgaggaccgcagccagcc

SEQ ID NO: 908 - RNA, 57 nt, synthetic construct
  source 1..57: mol_type = other RNA
gctggggaccgatcctgattgctcgctgcggcgagactgtgacacggaagcggcagt

SEQ ID NO: 909 - RNA, 57 nt, synthetic construct
  source 1..57: mol_type = other RNA
gctggggaccgatcctgattgctcgctgcggcgagaccgtgtcacacaactgcccaa

SEQ ID NO: 910 - RNA, 57 nt, synthetic construct
  source 1..57: mol_type = other RNA
gctggggaccgatcctgattgctcgctgcggcgagacggcagttgtgtgacacggaa

SEQ ID NO: 911 - RNA, 57 nt, synthetic construct
  source 1..57: mol_type = other RNA
gctggggaccgatcctgattgctcgctgcggcgagaccacatgagcgtggtcagggc

SEQ ID NO: 912 - RNA, 57 nt, synthetic construct
  source 1..57: mol_type = other RNA
gctggggaccgatcctgattgctcgctgcggcgagaccgccgggccctgaccacgct

SEQ ID NO: 913 - RNA, 57 nt, synthetic construct
  source 1..57: mol_type = other RNA
gctggggaccgatcctgattgctcgctgcggcgagacggggccagggagatggcccc

SEQ ID NO: 914 - RNA, 57 nt, synthetic construct
  source 1..57: mol_type = other RNA
gctggggaccgatcctgattgctcgctgcggcgagacatctgcgccttgggggccag

SEQ ID NO: 915 - RNA, 57 nt, synthetic construct
  source 1..57: mol_type = other RNA
gctggggaccgatcctgattgctcgctgcggcgagacgatctgcgccttgggggcca

SEQ ID NO: 916 - RNA, 57 nt, synthetic construct
  source 1..57: mol_type = other RNA
gctggggaccgatcctgattgctcgctgcggcgagacccagacaggccctggaaccc

SEQ ID NO: 917 - RNA, 57 nt, synthetic construct
  source 1..57: mol_type = other RNA
gctggggaccgatcctgattgctcgctgcggcgagacccagccctgctcgtggtgac

SEQ ID NO: 918 - RNA, 57 nt, synthetic construct
  source 1..57: mol_type = other RNA
gctggggaccgatcctgattgctcgctgcggcgagactctctggaagggcacaaagg

SEQ ID NO: 919 - RNA, 57 nt, synthetic construct
  source 1..57: mol_type = other RNA
gctggggaccgatcctgattgctcgctgcggcgagacgtgcccttccagagagaagg

SEQ ID NO: 920 - RNA, 57 nt, synthetic construct
  source 1..57: mol_type = other RNA
gctggggaccgatcctgattgctcgctgcggcgagactgcccttccagagagaaggg

SEQ ID NO: 921 - RNA, 57 nt, synthetic construct
  source 1..57: mol_type = other RNA
gctggggaccgatcctgattgctcgctgcggcgagactgcccttctctctggaaggg

SEQ ID NO: 922 - RNA, 57 nt, synthetic construct
  source 1..57: mol_type = other RNA
gctggggaccgatcctgattgctcgctgcggcgagaccagagagaagggcagaagtg

SEQ ID NO: 923 - RNA, 57 nt, synthetic construct
  source 1..57: mol_type = other RNA
gctggggaccgatcctgattgctcgctgcggcgagacgaactggccggctggcctgg

SEQ ID NO: 924 - RNA, 57 nt, synthetic construct
  source 1..57: mol_type = other RNA
gctggggaccgatcctgattgctcgctgcggcgagacggaactggccggctggcctg

SEQ ID NO: 925 - RNA, 57 nt, synthetic construct
  source 1..57: mol_type = other RNA
gctggggaccgatcctgattgctcgctgcggcgagaccaaaccctggtggttggtgt

SEQ ID NO: 926 - RNA, 57 nt, synthetic construct
  source 1..57: mol_type = other RNA
gctggggaccgatcctgattgctcgctgcggcgagacgtgtcgtgggcggcctgctg

SEQ ID NO: 927 - RNA, 57 nt, synthetic construct
  source 1..57: mol_type = other RNA
gctggggaccgatcctgattgctcgctgcggcgagaccctcgtgcggcccgggagca

SEQ ID NO: 928 - RNA, 57 nt, synthetic construct
  source 1..57: mol_type = other RNA
gctggggaccgatcctgattgctcgctgcggcgagactccctgcagagaaacacact

SEQ ID NO: 929 - RNA, 57 nt, synthetic construct
  source 1..57: mol_type = other RNA
gctggggaccgatcctgattgctcgctgcggcgagacctctgcagggacaataggag

SEQ ID NO: 930 - RNA, 57 nt, synthetic construct
  source 1..57: mol_type = other RNA
gctggggaccgatcctgattgctcgctgcggcgagactctgcagggacaataggagc

SEQ ID NO: 931 - RNA, 57 nt, synthetic construct
  source 1..57: mol_type = other RNA
gctggggaccgatcctgattgctcgctgcggcgagacctcctcaaagaaggaggacc

SEQ ID NO: 932 - RNA, 57 nt, synthetic construct
  source 1..57: mol_type = other RNA
gctggggaccgatcctgattgctcgctgcggcgagactcctcaaagaaggaggaccc

SEQ ID NO: 933 - RNA, 57 nt, synthetic construct
  source 1..57: mol_type = other RNA
gctggggaccgatcctgattgctcgctgcggcgagactctgtggactatggggagct

SEQ ID NO: 934 - RNA, 57 nt, synthetic construct
  source 1..57: mol_type = other RNA
gctggggaccgatcctgattgctcgctgcggcgagactctcgccactggaaatccag

SEQ ID NO: 935 - RNA, 57 nt, synthetic construct
  source 1..57: mol_type = other RNA
gctggggaccgatcctgattgctcgctgcggcgagacccagtggcgagagaagaccc

SEQ ID NO: 936 - RNA, 57 nt, synthetic construct
  source 1..57: mol_type = other RNA
gctggggaccgatcctgattgctcgctgcggcgagaccagtggcgagagaagacccc

SEQ ID NO: 937 - RNA, 57 nt, synthetic construct
  source 1..57: mol_type = other RNA
gctggggaccgatcctgattgctcgctgcggcgagaccgctaggaaagacaatggtg

SEQ ID NO: 938 - RNA, 57 nt, synthetic construct
  source 1..57: mol_type = other RNA
gctggggaccgatcctgattgctcgctgcggcgagactctttcctagcggaatgggc

SEQ ID NO: 939 - RNA, 57 nt, synthetic construct
  source 1..57: mol_type = other RNA
gctggggaccgatcctgattgctcgctgcggcgagaccctagcggaatgggcacctc

SEQ ID NO: 940 - RNA, 57 nt, synthetic construct
  source 1..57: mol_type = other RNA
gctggggaccgatcctgattgctcgctgcggcgagacctagcggaatgggcacctca

SEQ ID NO: 941 - RNA, 57 nt, synthetic construct
  source 1..57: mol_type = other RNA
gctggggaccgatcctgattgctcgctgcggcgagacgcccctctgaccggcttcct

SEQ ID NO: 942 - RNA, 57 nt, synthetic construct
  source 1..57: mol_type = other RNA
gctggggaccgatcctgattgctcgctgcggcgagaccttggccaccagtgttctgc

SEQ ID NO: 943 - RNA, 57 nt, synthetic construct
  source 1..57: mol_type = other RNA
gctggggaccgatcctgattgctcgctgcggcgagacgccaccagtgttctgcagac

SEQ ID NO: 944 - RNA, 57 nt, synthetic construct
  source 1..57: mol_type = other RNA
gctggggaccgatcctgattgctcgctgcggcgagactgcagaccctccaccatgag

SEQ ID NO: 945 - RNA, 57 nt, synthetic construct
  source 1..57: mol_type = other RNA
gctggggaccgatcctgattgctcgctgcggcgagactcctgaggaaatgcgctgac

SEQ ID NO: 946 - RNA, 57 nt, synthetic construct
  source 1..57: mol_type = other RNA
gctggggaccgatcctgattgctcgctgcggcgagaccctcaggagaagcaggcagg

SEQ ID NO: 947 - RNA, 57 nt, synthetic construct
  source 1..57: mol_type = other RNA
gctggggaccgatcctgattgctcgctgcggcgagacctcaggagaagcaggcaggg

SEQ ID NO: 948 - RNA, 57 nt, synthetic construct
  source 1..57: mol_type = other RNA
gctggggaccgatcctgattgctcgctgcggcgagaccaggccgtccaggggctgag

SEQ ID NO: 949 - RNA, 57 nt, synthetic construct
  source 1..57: mol_type = other RNA
gctggggaccgatcctgattgctcgctgcggcgagacagacatgagtcctgtggtgg

SEQ ID NO: 950 - RNA, 57 nt, synthetic construct
  source 1..57: mol_type = other RNA
gctggggaccgatcctgattgctcgctgcggcgagacaggtcctgccagcacagagc

SEQ ID NO: 951 - RNA, 57 nt, synthetic construct
  source 1..57: mol_type = other RNA
gctggggaccgatcctgattgctcgctgcggcgagacagggagctggacgcaggcag

SEQ ID NO: 952 - RNA, 57 nt, synthetic construct
  source 1..57: mol_type = other RNA
gctggggaccgatcctgattgctcgctgcggcgagacagccccgggccgcaggcagc

SEQ ID NO: 953 - RNA, 57 nt, synthetic construct
  source 1..57: mol_type = other RNA
gctggggaccgatcctgattgctcgctgcggcgagacaggcaggaggctccggggcg

SEQ ID NO: 954 - RNA, 57 nt, synthetic construct
  source 1..57: mol_type = other RNA
gctggggaccgatcctgattgctcgctgcggcgagacggggctggttggagatggcc

SEQ ID NO: 955 - RNA, 57 nt, synthetic construct
  source 1..57: mol_type = other RNA
gctggggaccgatcctgattgctcgctgcggcgagacgagatggccttggagcagcc

SEQ ID NO: 956 - RNA, 57 nt, synthetic construct
  source 1..57: mol_type = other RNA
gctggggaccgatcctgattgctcgctgcggcgagacgctgctccaaggccatctcc

SEQ ID NO: 957 - RNA, 57 nt, synthetic construct
  source 1..57: mol_type = other RNA
gctggggaccgatcctgattgctcgctgcggcgagacgagcagccaaggtgcccctg

SEQ ID NO: 958 - RNA, 57 nt, synthetic construct
  source 1..57: mol_type = other RNA
gctggggaccgatcctgattgctcgctgcggcgagacgggatgccactgccaggggc

SEQ ID NO: 959 - RNA, 57 nt, synthetic construct
  source 1..57: mol_type = other RNA
gctggggaccgatcctgattgctcgctgcggcgagaccgggatgccactgccagggg

SEQ ID NO: 960 - RNA, 57 nt, synthetic construct
  source 1..57: mol_type = other RNA
gctggggaccgatcctgattgctcgctgcggcgagacggccctgcgtccagggcgtt

SEQ ID NO: 961 - RNA, 57 nt, synthetic construct
  source 1..57: mol_type = other RNA
gctggggaccgatcctgattgctcgctgcggcgagactctgctccctgcaggcctag

SEQ ID NO: 962 - RNA, 57 nt, synthetic construct
  source 1..57: mol_type = other RNA
gctggggaccgatcctgattgctcgctgcggcgagactctaggcctgcagggagcag

SEQ ID NO: 963 - RNA, 57 nt, synthetic construct
  source 1..57: mol_type = other RNA
gctggggaccgatcctgattgctcgctgcggcgagaccctgaaacttctctaggcct

SEQ ID NO: 964 - RNA, 57 nt, synthetic construct
  source 1..57: mol_type = other RNA
gctggggaccgatcctgattgctcgctgcggcgagactgaccttccctgaaacttct

SEQ ID NO: 965 - RNA, 57 nt, synthetic construct
  source 1..57: mol_type = other RNA
gctggggaccgatcctgattgctcgctgcggcgagaccagggaaggtcagaagagct

SEQ ID NO: 966 - RNA, 57 nt, synthetic construct
  source 1..57: mol_type = other RNA
gctggggaccgatcctgattgctcgctgcggcgagacagggaaggtcagaagagctc

SEQ ID NO: 967 - RNA, 57 nt, synthetic construct
  source 1..57: mol_type = other RNA
gctggggaccgatcctgattgctcgctgcggcgagacctgccctgcccaccacagcc

SEQ ID NO: 968 - RNA, 57 nt, synthetic construct
  source 1..57: mol_type = other RNA
gctggggaccgatcctgattgctcgctgcggcgagaccctgccctgcccaccacagc

SEQ ID NO: 969 - RNA, 57 nt, synthetic construct
  source 1..57: mol_type = other RNA
gctggggaccgatcctgattgctcgctgcggcgagacacacatgcccaggcagcacc

SEQ ID NO: 970 - RNA, 57 nt, synthetic construct
  source 1..57: mol_type = other RNA
gctggggaccgatcctgattgctcgctgcggcgagaccacatgcccaggcagcacct

SEQ ID NO: 971 - RNA, 57 nt, synthetic construct
  source 1..57: mol_type = other RNA
gctggggaccgatcctgattgctcgctgcggcgagaccctgccccacaaagggcctg

SEQ ID NO: 972 - RNA, 57 nt, synthetic construct
  source 1..57: mol_type = other RNA
gctggggaccgatcctgattgctcgctgcggcgagacgtggggcagggaagctgagg

SEQ ID NO: 973 - RNA, 57 nt, synthetic construct
  source 1..57: mol_type = other RNA
gctggggaccgatcctgattgctcgctgcggcgagactggggcagggaagctgaggc

SEQ ID NO: 974 - RNA, 57 nt, synthetic construct
  source 1..57: mol_type = other RNA
gctggggaccgatcctgattgctcgctgcggcgagacctgcctcagcttccctgccc

SEQ ID NO: 975 - RNA, 57 nt, synthetic construct
  source 1..57: mol_type = other RNA
gctggggaccgatcctgattgctcgctgcggcgagaccaggcccagccagcactctg

SEQ ID NO: 976 - RNA, 57 nt, synthetic construct
  source 1..57: mol_type = other RNA
gctggggaccgatcctgattgctcgctgcggcgagacaggcccagccagcactctgg

SEQ ID NO: 977 - RNA, 57 nt, synthetic construct
  source 1..57: mol_type = other RNA
gctggggaccgatcctgattgctcgctgcggcgagaccaccccagcccctcacacca

SEQ ID NO: 978 - RNA, 57 nt, synthetic construct
  source 1..57: mol_type = other RNA
gctggggaccgatcctgattgctcgctgcggcgagacggaccgtaggatgtccctct

SEQ ID NO: 979 - RNA, 56 nt, synthetic construct
  source 1..56: mol_type = other RNA
ctttcaagactaatagattgctccttacgaggagacctacacaatgcgttgcctgg

SEQ ID NO: 980 - RNA, 56 nt, synthetic construct
  source 1..56: mol_type = other RNA
ctttcaagactaatagattgctccttacgaggagacgggctctgacaggtaggacc

SEQ ID NO: 981 - RNA, 56 nt, synthetic construct
  source 1..56: mol_type = other RNA
ctttcaagactaatagattgctccttacgaggagactgtaggaatcccagccaggc

SEQ ID NO: 982 - RNA, 56 nt, synthetic construct
  source 1..56: mol_type = other RNA
ctttcaagactaatagattgctccttacgaggagaccctggctccacgccctgctg

SEQ ID NO: 983 - RNA, 56 nt, synthetic construct
  source 1..56: mol_type = other RNA
ctttcaagactaatagattgctccttacgaggagacgggaagctgagggcacgagg

SEQ ID NO: 984 - RNA, 56 nt, synthetic construct
  source 1..56: mol_type = other RNA
ctttcaagactaatagattgctccttacgaggagacacagcgatgctgaccccctg

SEQ ID NO: 985 - RNA, 56 nt, synthetic construct
  source 1..56: mol_type = other RNA
ctttcaagactaatagattgctccttacgaggagacttaacagcgatgctgacccc

SEQ ID NO: 986 - RNA, 56 nt, synthetic construct
  source 1..56: mol_type = other RNA
ctttcaagactaatagattgctccttacgaggagactatgaccagatggacctggc

SEQ ID NO: 987 - RNA, 56 nt, synthetic construct
  source 1..56: mol_type = other RNA
ctttcaagactaatagattgctccttacgaggagacgggcccctagaaggtggcta

SEQ ID NO: 988 - RNA, 56 nt, synthetic construct
  source 1..56: mol_type = other RNA
ctttcaagactaatagattgctccttacgaggagactaggggccccaactccatgg

SEQ ID NO: 989 - RNA, 56 nt, synthetic construct
  source 1..56: mol_type = other RNA
ctttcaagactaatagattgctccttacgaggagacagaagctccaggtagccacc

SEQ ID NO: 990 - RNA, 56 nt, synthetic construct
  source 1..56: mol_type = other RNA
ctttcaagactaatagattgctccttacgaggagactccagccaggtccatctggt

SEQ ID NO: 991 - RNA, 56 nt, synthetic construct
  source 1..56: mol_type = other RNA
ctttcaagactaatagattgctccttacgaggagacttctccagccaggtccatct

SEQ ID NO: 992 - RNA, 57 nt, synthetic construct
  source 1..57: mol_type = other RNA
gctggggaccgatcctgattgctcgctgcggcgagacctacacaatgcgttgcctgg

SEQ ID NO: 993 - RNA, 57 nt, synthetic construct
  source 1..57: mol_type = other RNA
gctggggaccgatcctgattgctcgctgcggcgagacgggctctgacaggtaggacc

SEQ ID NO: 994 - RNA, 57 nt, synthetic construct
  source 1..57: mol_type = other RNA
gctggggaccgatcctgattgctcgctgcggcgagactgtaggaatcccagccaggc

SEQ ID NO: 995 - RNA, 57 nt, synthetic construct
  source 1..57: mol_type = other RNA
gctggggaccgatcctgattgctcgctgcggcgagaccctggctccacgccctgctg

SEQ ID NO: 996 - RNA, 57 nt, synthetic construct
  source 1..57: mol_type = other RNA
gctggggaccgatcctgattgctcgctgcggcgagacgggaagctgagggcacgagg

SEQ ID NO: 997 - RNA, 57 nt, synthetic construct
  source 1..57: mol_type = other RNA
gctggggaccgatcctgattgctcgctgcggcgagacacagcgatgctgaccccctg

SEQ ID NO: 998 - RNA, 57 nt, synthetic construct
  source 1..57: mol_type = other RNA
gctggggaccgatcctgattgctcgctgcggcgagacttaacagcgatgctgacccc

SEQ ID NO: 999 - RNA, 57 nt, synthetic construct
  source 1..57: mol_type = other RNA
gctggggaccgatcctgattgctcgctgcggcgagactatgaccagatggacctggc

SEQ ID NO: 1000 - RNA, 57 nt, synthetic construct
  source 1..57: mol_type = other RNA
gctggggaccgatcctgattgctcgctgcggcgagacgggcccctagaaggtggcta

SEQ ID NO: 1001 - RNA, 57 nt, synthetic construct
  source 1..57: mol_type = other RNA
gctggggaccgatcctgattgctcgctgcggcgagactaggggccccaactccatgg

SEQ ID NO: 1002 - RNA, 57 nt, synthetic construct
  source 1..57: mol_type = other RNA
gctggggaccgatcctgattgctcgctgcggcgagacagaagctccaggtagccacc

SEQ ID NO: 1003 - RNA, 57 nt, synthetic construct
  source 1..57: mol_type = other RNA
gctggggaccgatcctgattgctcgctgcggcgagactccagccaggtccatctggt

SEQ ID NO: 1004 - RNA, 57 nt, synthetic construct
  source 1..57: mol_type = other RNA
gctggggaccgatcctgattgctcgctgcggcgagacttctccagccaggtccatct

SEQ ID NO: 1005 - RNA, 56 nt, synthetic construct
  source 1..56: mol_type = other RNA
ctttcaagactaatagattgctccttacgaggagacccgctgttgccgccgctgct

SEQ ID NO: 1006 - RNA, 56 nt, synthetic construct
  source 1..56: mol_type = other RNA
ctttcaagactaatagattgctccttacgaggagacccgccgctgctgctgctgtt

SEQ ID NO: 1007 - RNA, 56 nt, synthetic construct
  source 1..56: mol_type = other RNA
ctttcaagactaatagattgctccttacgaggagacctgctactgtgccccaccgg

SEQ ID NO: 1008 - RNA, 56 nt, synthetic construct
  source 1..56: mol_type = other RNA
ctttcaagactaatagattgctccttacgaggagacataatctccatcctcgtcct

SEQ ID NO: 1009 - RNA, 56 nt, synthetic construct
  source 1..56: mol_type = other RNA
ctttcaagactaatagattgctccttacgaggagactgaagagctgatgctcgccc

SEQ ID NO: 1010 - RNA, 56 nt, synthetic construct
  source 1..56: mol_type = other RNA
ctttcaagactaatagattgctccttacgaggagacgagcaacggcggaaggtggc

SEQ ID NO: 1011 - RNA, 56 nt, synthetic construct
  source 1..56: mol_type = other RNA
ctttcaagactaatagattgctccttacgaggagacctggcagcctccaggcctcc

SEQ ID NO: 1012 - RNA, 56 nt, synthetic construct
  source 1..56: mol_type = other RNA
ctttcaagactaatagattgctccttacgaggagactggtgctgatggaggagacc

SEQ ID NO: 1013 - RNA, 56 nt, synthetic construct
  source 1..56: mol_type = other RNA
ctttcaagactaatagattgctccttacgaggagacaatctgtagcctctgggtct

SEQ ID NO: 1014 - RNA, 56 nt, synthetic construct
  source 1..56: mol_type = other RNA
ctttcaagactaatagattgctccttacgaggagacttcaatctgtagcctctggg

SEQ ID NO: 1015 - RNA, 56 nt, synthetic construct
  source 1..56: mol_type = other RNA
ctttcaagactaatagattgctccttacgaggagacgttcaatctgtagcctctgg

SEQ ID NO: 1016 - RNA, 56 nt, synthetic construct
  source 1..56: mol_type = other RNA
ctttcaagactaatagattgctccttacgaggagacaacaaactgcccaccgcctg

SEQ ID NO: 1017 - RNA, 56 nt, synthetic construct
  source 1..56: mol_type = other RNA
ctttcaagactaatagattgctccttacgaggagacatgacatagccccggcgggc

SEQ ID NO: 1018 - RNA, 56 nt, synthetic construct
  source 1..56: mol_type = other RNA
ctttcaagactaatagattgctccttacgaggagactacatatcttttatgacctc

SEQ ID NO: 1019 - RNA, 56 nt, synthetic construct
  source 1..56: mol_type = other RNA
ctttcaagactaatagattgctccttacgaggagactatgacctcttccctggctt

SEQ ID NO: 1020 - RNA, 56 nt, synthetic construct
  source 1..56: mol_type = other RNA
ctttcaagactaatagattgctccttacgaggagacatgacctcttccctggcttc

SEQ ID NO: 1021 - RNA, 56 nt, synthetic construct
  source 1..56: mol_type = other RNA
ctttcaagactaatagattgctccttacgaggagactgacctcttccctggcttct

SEQ ID NO: 1022 - RNA, 56 nt, synthetic construct
  source 1..56: mol_type = other RNA
ctttcaagactaatagattgctccttacgaggagacaccaagaagccagggaagag

SEQ ID NO: 1023 - RNA, 56 nt, synthetic construct
  source 1..56: mol_type = other RNA
ctttcaagactaatagattgctccttacgaggagaccctggcttcttggtgaagat

SEQ ID NO: 1024 - RNA, 56 nt, synthetic construct
  source 1..56: mol_type = other RNA
ctttcaagactaatagattgctccttacgaggagacttggtgaagatgagcagtga

SEQ ID NO: 1025 - RNA, 56 nt, synthetic construct
  source 1..56: mol_type = other RNA
ctttcaagactaatagattgctccttacgaggagacgtgaagatgagcagtgacct

SEQ ID NO: 1026 - RNA, 56 nt, synthetic construct
  source 1..56: mol_type = other RNA
ctttcaagactaatagattgctccttacgaggagacccccatgtggagtacattga

SEQ ID NO: 1027 - RNA, 56 nt, synthetic construct
  source 1..56: mol_type = other RNA
ctttcaagactaatagattgctccttacgaggagacctcaatgtactccacatggg

SEQ ID NO: 1028 - RNA, 56 nt, synthetic construct
  source 1..56: mol_type = other RNA
ctttcaagactaatagattgctccttacgaggagacaggaagactcctttgtcttc

SEQ ID NO: 1029 - RNA, 56 nt, synthetic construct
  source 1..56: mol_type = other RNA
ctttcaagactaatagattgctccttacgaggagacgtcttcgcccagagcatccc

SEQ ID NO: 1030 - RNA, 56 nt, synthetic construct
  source 1..56: mol_type = other RNA
ctttcaagactaatagattgctccttacgaggagactcttcgcccagagcatccca

SEQ ID NO: 1031 - RNA, 56 nt, synthetic construct
  source 1..56: mol_type = other RNA
ctttcaagactaatagattgctccttacgaggagacgcccagagcatcccatggaa

SEQ ID NO: 1032 - RNA, 56 nt, synthetic construct
  source 1..56: mol_type = other RNA
ctttcaagactaatagattgctccttacgaggagaccatgggatgctctgggcgaa

SEQ ID NO: 1033 - RNA, 56 nt, synthetic construct
  source 1..56: mol_type = other RNA
ctttcaagactaatagattgctccttacgaggagacgctccaggttccatgggatg

SEQ ID NO: 1034 - RNA, 56 nt, synthetic construct
  source 1..56: mol_type = other RNA
ctttcaagactaatagattgctccttacgaggagactcccagcatggcaccagaca

SEQ ID NO: 1035 - RNA, 56 nt, synthetic construct
  source 1..56: mol_type = other RNA
ctttcaagactaatagattgctccttacgaggagacctctgtctggtgccatgctg

SEQ ID NO: 1036 - RNA, 56 nt, synthetic construct
  source 1..56: mol_type = other RNA
ctttcaagactaatagattgctccttacgaggagacgataccagcatccagggtgc

SEQ ID NO: 1037 - RNA, 56 nt, synthetic construct
  source 1..56: mol_type = other RNA
ctttcaagactaatagattgctccttacgaggagacagggcagggtcaccatcacc

SEQ ID NO: 1038 - RNA, 56 nt, synthetic construct
  source 1..56: mol_type = other RNA
ctttcaagactaatagattgctccttacgaggagacaagtcggtgatggtgaccct

SEQ ID NO: 1039 - RNA, 56 nt, synthetic construct
  source 1..56: mol_type = other RNA
ctttcaagactaatagattgctccttacgaggagacaacagcgtgccggaggagga

SEQ ID NO: 1040 - RNA, 56 nt, synthetic construct
  source 1..56: mol_type = other RNA
ctttcaagactaatagattgctccttacgaggagacgccacaccagcatcccggcc

SEQ ID NO: 1041 - RNA, 56 nt, synthetic construct
  source 1..56: mol_type = other RNA
ctttcaagactaatagattgctccttacgaggagacagcacacgcaggctgtgcag

SEQ ID NO: 1042 - RNA, 56 nt, synthetic construct
  source 1..56: mol_type = other RNA
ctttcaagactaatagattgctccttacgaggagacacagttgagcacacgcaggc

SEQ ID NO: 1043 - RNA, 56 nt, synthetic construct
  source 1..56: mol_type = other RNA
ctttcaagactaatagattgctccttacgaggagacccttgacagttgagcacacg

SEQ ID NO: 1044 - RNA, 56 nt, synthetic construct
  source 1..56: mol_type = other RNA
ctttcaagactaatagattgctccttacgaggagacgctgactcttccgaataaac

SEQ ID NO: 1045 - RNA, 56 nt, synthetic construct
  source 1..56: mol_type = other RNA
ctttcaagactaatagattgctccttacgaggagacattcggaagagtcagctaat

SEQ ID NO: 1046 - RNA, 56 nt, synthetic construct
  source 1..56: mol_type = other RNA
ctttcaagactaatagattgctccttacgaggagacttcggaagagtcagctaatc

SEQ ID NO: 1047 - RNA, 56 nt, synthetic construct
  source 1..56: mol_type = other RNA
ctttcaagactaatagattgctccttacgaggagacggaagagtcagctaatccag

SEQ ID NO: 1048 - RNA, 56 nt, synthetic construct
  source 1..56: mol_type = other RNA
ctttcaagactaatagattgctccttacgaggagactgctgcccctggccggtggg

SEQ ID NO: 1049 - RNA, 56 nt, synthetic construct
  source 1..56: mol_type = other RNA
ctttcaagactaatagattgctccttacgaggagacaggatgcggctatacccacc

SEQ ID NO: 1050 - RNA, 56 nt, synthetic construct
  source 1..56: mol_type = other RNA
ctttcaagactaatagattgctccttacgaggagacccagctgctgcaaccagcac

SEQ ID NO: 1051 - RNA, 56 nt, synthetic construct
  source 1..56: mol_type = other RNA
ctttcaagactaatagattgctccttacgaggagaccagcagctgggaacttccgg

SEQ ID NO: 1052 - RNA, 56 nt, synthetic construct
  source 1..56: mol_type = other RNA
ctttcaagactaatagattgctccttacgaggagaccgggacgacgcctgcctcta

SEQ ID NO: 1053 - RNA, 56 nt, synthetic construct
  source 1..56: mol_type = other RNA
ctttcaagactaatagattgctccttacgaggagacgtggccccgactgtgatgac

SEQ ID NO: 1054 - RNA, 56 nt, synthetic construct
  source 1..56: mol_type = other RNA
ctttcaagactaatagattgctccttacgaggagacccttggggactttggggact

SEQ ID NO: 1055 - RNA, 56 nt, synthetic construct
  source 1..56: mol_type = other RNA
ctttcaagactaatagattgctccttacgaggagacgtccccaaagtccccaaggt

SEQ ID NO: 1056 - RNA, 56 nt, synthetic construct
  source 1..56: mol_type = other RNA
ctttcaagactaatagattgctccttacgaggagacgggactttggggactaattt

SEQ ID NO: 1057 - RNA, 56 nt, synthetic construct
  source 1..56: mol_type = other RNA
ctttcaagactaatagattgctccttacgaggagacggggactaattttggacgct

SEQ ID NO: 1058 - RNA, 56 nt, synthetic construct
  source 1..56: mol_type = other RNA
ctttcaagactaatagattgctccttacgaggagacgggactaattttggacgctg

SEQ ID NO: 1059 - RNA, 56 nt, synthetic construct
  source 1..56: mol_type = other RNA
ctttcaagactaatagattgctccttacgaggagactggacgctgtgtggatctct

SEQ ID NO: 1060 - RNA, 56 nt, synthetic construct
  source 1..56: mol_type = other RNA
ctttcaagactaatagattgctccttacgaggagacggacgctgtgtggatctctt

SEQ ID NO: 1061 - RNA, 56 nt, synthetic construct
  source 1..56: mol_type = other RNA
ctttcaagactaatagattgctccttacgaggagacgacgctgtgtggatctcttt

SEQ ID NO: 1062 - RNA, 56 nt, synthetic construct
  source 1..56: mol_type = other RNA
ctttcaagactaatagattgctccttacgaggagacccgggggcaaagagatccac

SEQ ID NO: 1063 - RNA, 56 nt, synthetic construct
  source 1..56: mol_type = other RNA
ctttcaagactaatagattgctccttacgaggagacgcccccgggaaggacatcat

SEQ ID NO: 1064 - RNA, 56 nt, synthetic construct
  source 1..56: mol_type = other RNA
ctttcaagactaatagattgctccttacgaggagaccccccgggaaggacatcatc

SEQ ID NO: 1065 - RNA, 56 nt, synthetic construct
  source 1..56: mol_type = other RNA
ctttcaagactaatagattgctccttacgaggagacatgtcacagagtgggacctc

SEQ ID NO: 1066 - RNA, 56 nt, synthetic construct
  source 1..56: mol_type = other RNA
ctttcaagactaatagattgctccttacgaggagactggctcggatgctgagccgg

SEQ ID NO: 1067 - RNA, 56 nt, synthetic construct
  source 1..56: mol_type = other RNA
ctttcaagactaatagattgctccttacgaggagacccctggccgagctgcggcag

SEQ ID NO: 1068 - RNA, 56 nt, synthetic construct
  source 1..56: mol_type = other RNA
ctttcaagactaatagattgctccttacgaggagacgtagagaagtggatcagcct

SEQ ID NO: 1069 - RNA, 56 nt, synthetic construct
  source 1..56: mol_type = other RNA
ctttcaagactaatagattgctccttacgaggagacggtagagaagtggatcagcc

SEQ ID NO: 1070 - RNA, 56 nt, synthetic construct
  source 1..56: mol_type = other RNA
ctttcaagactaatagattgctccttacgaggagactctaccaaagacgtcatcaa

SEQ ID NO: 1071 - RNA, 56 nt, synthetic construct
  source 1..56: mol_type = other RNA
ctttcaagactaatagattgctccttacgaggagacatgacgtctttggtagagaa

SEQ ID NO: 1072 - RNA, 56 nt, synthetic construct
  source 1..56: mol_type = other RNA
ctttcaagactaatagattgctccttacgaggagaccctgaggaccagcaggtgct

SEQ ID NO: 1073 - RNA, 56 nt, synthetic construct
  source 1..56: mol_type = other RNA
ctttcaagactaatagattgctccttacgaggagacggggtcagcacctgctggtc

SEQ ID NO: 1074 - RNA, 56 nt, synthetic construct
  source 1..56: mol_type = other RNA
ctttcaagactaatagattgctccttacgaggagacgagtgggccccgagtgtgcc

SEQ ID NO: 1075 - RNA, 56 nt, synthetic construct
  source 1..56: mol_type = other RNA
ctttcaagactaatagattgctccttacgaggagactggggcacagcgggctgtag

SEQ ID NO: 1076 - RNA, 56 nt, synthetic construct
  source 1..56: mol_type = other RNA
ctttcaagactaatagattgctccttacgaggagactccaggagcgggaggcgtcg

SEQ ID NO: 1077 - RNA, 56 nt, synthetic construct
  source 1..56: mol_type = other RNA
ctttcaagactaatagattgctccttacgaggagaccagacctgctggcctcctat

SEQ ID NO: 1078 - RNA, 56 nt, synthetic construct
  source 1..56: mol_type = other RNA
ctttcaagactaatagattgctccttacgaggagacagggccttgcagacctgctg

SEQ ID NO: 1079 - RNA, 56 nt, synthetic construct
  source 1..56: mol_type = other RNA
ctttcaagactaatagattgctccttacgaggagacgggggtgagggtgtctatgc

SEQ ID NO: 1080 - RNA, 56 nt, synthetic construct
  source 1..56: mol_type = other RNA
ctttcaagactaatagattgctccttacgaggagacggggtgagggtgtctatgcc

SEQ ID NO: 1081 - RNA, 56 nt, synthetic construct
  source 1..56: mol_type = other RNA
ctttcaagactaatagattgctccttacgaggagacgcacggggaaccaggcagca

SEQ ID NO: 1082 - RNA, 56 nt, synthetic construct
  source 1..56: mol_type = other RNA
ctttcaagactaatagattgctccttacgaggagaccccgtgccaactgcagcatc

SEQ ID NO: 1083 - RNA, 56 nt, synthetic construct
  source 1..56: mol_type = other RNA
ctttcaagactaatagattgctccttacgaggagactggatgctgcagttggcacg

SEQ ID NO: 1084 - RNA, 56 nt, synthetic construct
  source 1..56: mol_type = other RNA
ctttcaagactaatagattgctccttacgaggagactggtggcagtggacatgggt

SEQ ID NO: 1085 - RNA, 56 nt, synthetic construct
  source 1..56: mol_type = other RNA
ctttcaagactaatagattgctccttacgaggagaccacttcccaatggaagctgc

SEQ ID NO: 1086 - RNA, 56 nt, synthetic construct
  source 1..56: mol_type = other RNA
ctttcaagactaatagattgctccttacgaggagaccattgggaagtggaagacct

SEQ ID NO: 1087 - RNA, 56 nt, synthetic construct
  source 1..56: mol_type = other RNA
ctttcaagactaatagattgctccttacgaggagacggaagtggaagaccttagtg

SEQ ID NO: 1088 - RNA, 56 nt, synthetic construct
  source 1..56: mol_type = other RNA
ctttcaagactaatagattgctccttacgaggagacgtgtccggaggcagcctgcg

SEQ ID NO: 1089 - RNA, 56 nt, synthetic construct
  source 1..56: mol_type = other RNA
ctttcaagactaatagattgctccttacgaggagacgccaccaggcggccagtgtc

SEQ ID NO: 1090 - RNA, 56 nt, synthetic construct
  source 1..56: mol_type = other RNA
ctttcaagactaatagattgctccttacgaggagacctgctgccatgccccagggc

SEQ ID NO: 1091 - RNA, 56 nt, synthetic construct
  source 1..56: mol_type = other RNA
ctttcaagactaatagattgctccttacgaggagaccagccctggggcatggcagc

SEQ ID NO: 1092 - RNA, 56 nt, synthetic construct
  source 1..56: mol_type = other RNA
ctttcaagactaatagattgctccttacgaggagaccattccagccctggggcatg

SEQ ID NO: 1093 - RNA, 56 nt, synthetic construct
  source 1..56: mol_type = other RNA
ctttcaagactaatagattgctccttacgaggagacgcattccagccctggggcat

SEQ ID NO: 1094 - RNA, 56 nt, synthetic construct
  source 1..56: mol_type = other RNA
ctttcaagactaatagattgctccttacgaggagactgcattccagccctggggca

SEQ ID NO: 1095 - RNA, 56 nt, synthetic construct
  source 1..56: mol_type = other RNA
ctttcaagactaatagattgctccttacgaggagacattttgcattccagccctgg

SEQ ID NO: 1096 - RNA, 56 nt, synthetic construct
  source 1..56: mol_type = other RNA
ctttcaagactaatagattgctccttacgaggagaccatccagtcagggtccatcc

SEQ ID NO: 1097 - RNA, 56 nt, synthetic construct
  source 1..56: mol_type = other RNA
ctttcaagactaatagattgctccttacgaggagactccacgctgtaggctcccag

SEQ ID NO: 1098 - RNA, 56 nt, synthetic construct
  source 1..56: mol_type = other RNA
ctttcaagactaatagattgctccttacgaggagacccacacacaggttgtccacg

SEQ ID NO: 1099 - RNA, 56 nt, synthetic construct
  source 1..56: mol_type = other RNA
ctttcaagactaatagattgctccttacgaggagactccactggtcctgtctgctc

SEQ ID NO: 1100 - RNA, 56 nt, synthetic construct
  source 1..56: mol_type = other RNA
ctttcaagactaatagattgctccttacgaggagacctgaaggccggctccggcag

SEQ ID NO: 1101 - RNA, 57 nt, synthetic construct
  source 1..57: mol_type = other RNA
gctggggaccgatcctgattgctcgctgcggcgagacccgctgttgccgccgctgct

SEQ ID NO: 1102 - RNA, 57 nt, synthetic construct
  source 1..57: mol_type = other RNA
gctggggaccgatcctgattgctcgctgcggcgagacccgccgctgctgctgctgtt

SEQ ID NO: 1103 - RNA, 57 nt, synthetic construct
  source 1..57: mol_type = other RNA
gctggggaccgatcctgattgctcgctgcggcgagacctgctactgtgccccaccgg

SEQ ID NO: 1104 - RNA, 57 nt, synthetic construct
  source 1..57: mol_type = other RNA
gctggggaccgatcctgattgctcgctgcggcgagacataatctccatcctcgtcct

SEQ ID NO: 1105 - RNA, 57 nt, synthetic construct
  source 1..57: mol_type = other RNA
gctggggaccgatcctgattgctcgctgcggcgagactgaagagctgatgctcgccc

SEQ ID NO: 1106 - RNA, 57 nt, synthetic construct
  source 1..57: mol_type = other RNA
gctggggaccgatcctgattgctcgctgcggcgagacgagcaacggcggaaggtggc

SEQ ID NO: 1107 - RNA, 57 nt, synthetic construct
  source 1..57: mol_type = other RNA
gctggggaccgatcctgattgctcgctgcggcgagacctggcagcctccaggcctcc

SEQ ID NO: 1108 - RNA, 57 nt, synthetic construct
  source 1..57: mol_type = other RNA
gctggggaccgatcctgattgctcgctgcggcgagactggtgctgatggaggagacc

SEQ ID NO: 1109 - RNA, 57 nt, synthetic construct
  source 1..57: mol_type = other RNA
gctggggaccgatcctgattgctcgctgcggcgagacaatctgtagcctctgggtct

SEQ ID NO: 1110 - RNA, 57 nt, synthetic construct
  source 1..57: mol_type = other RNA
gctggggaccgatcctgattgctcgctgcggcgagacttcaatctgtagcctctggg

SEQ ID NO: 1111 - RNA, 57 nt, synthetic construct
  source 1..57: mol_type = other RNA
gctggggaccgatcctgattgctcgctgcggcgagacgttcaatctgtagcctctgg

SEQ ID NO: 1112 - RNA, 57 nt, synthetic construct
  source 1..57: mol_type = other RNA
gctggggaccgatcctgattgctcgctgcggcgagacaacaaactgcccaccgcctg

SEQ ID NO: 1113 - RNA, 57 nt, synthetic construct
  source 1..57: mol_type = other RNA
gctggggaccgatcctgattgctcgctgcggcgagacatgacatagccccggcgggc

SEQ ID NO: 1114 - RNA, 57 nt, synthetic construct
  source 1..57: mol_type = other RNA
gctggggaccgatcctgattgctcgctgcggcgagactacatatcttttatgacctc

SEQ ID NO: 1115 - RNA, 57 nt, synthetic construct
  source 1..57: mol_type = other RNA
gctggggaccgatcctgattgctcgctgcggcgagactatgacctcttccctggctt

SEQ ID NO: 1116 - RNA, 57 nt, synthetic construct
  source 1..57: mol_type = other RNA
gctggggaccgatcctgattgctcgctgcggcgagacatgacctcttccctggcttc

SEQ ID NO: 1117 - RNA, 57 nt, synthetic construct
  source 1..57: mol_type = other RNA
gctggggaccgatcctgattgctcgctgcggcgagactgacctcttccctggcttct

SEQ ID NO: 1118 - RNA, 57 nt, synthetic construct
  source 1..57: mol_type = other RNA
gctggggaccgatcctgattgctcgctgcggcgagacaccaagaagccagggaagag

SEQ ID NO: 1119 - RNA, 57 nt, synthetic construct
  source 1..57: mol_type = other RNA
gctggggaccgatcctgattgctcgctgcggcgagaccctggcttcttggtgaagat

SEQ ID NO: 1120 - RNA, 57 nt, synthetic construct
  source 1..57: mol_type = other RNA
gctggggaccgatcctgattgctcgctgcggcgagacttggtgaagatgagcagtga

SEQ ID NO: 1121 - RNA, 57 nt, synthetic construct
  source 1..57: mol_type = other RNA
gctggggaccgatcctgattgctcgctgcggcgagacgtgaagatgagcagtgacct

SEQ ID NO: 1122 - RNA, 57 nt, synthetic construct
  source 1..57: mol_type = other RNA
gctggggaccgatcctgattgctcgctgcggcgagacccccatgtggagtacattga

SEQ ID NO: 1123 - RNA, 57 nt, synthetic construct
  source 1..57: mol_type = other RNA
gctggggaccgatcctgattgctcgctgcggcgagacctcaatgtactccacatggg

SEQ ID NO: 1124 - RNA, 57 nt, synthetic construct
  source 1..57: mol_type = other RNA
gctggggaccgatcctgattgctcgctgcggcgagacaggaagactcctttgtcttc

SEQ ID NO: 1125 - RNA, 57 nt, synthetic construct
  source 1..57: mol_type = other RNA
gctggggaccgatcctgattgctcgctgcggcgagacgtcttcgcccagagcatccc

SEQ ID NO: 1126 - RNA, 57 nt, synthetic construct
  source 1..57: mol_type = other RNA
gctggggaccgatcctgattgctcgctgcggcgagactcttcgcccagagcatccca

SEQ ID NO: 1127 - RNA, 57 nt, synthetic construct
  source 1..57: mol_type = other RNA
gctggggaccgatcctgattgctcgctgcggcgagacgcccagagcatcccatggaa

SEQ ID NO: 1128 - RNA, 57 nt, synthetic construct
  source 1..57: mol_type = other RNA
gctggggaccgatcctgattgctcgctgcggcgagaccatgggatgctctgggcgaa

SEQ ID NO: 1129 - RNA, 57 nt, synthetic construct
  source 1..57: mol_type = other RNA
gctggggaccgatcctgattgctcgctgcggcgagacgctccaggttccatgggatg

SEQ ID NO: 1130 - RNA, 57 nt, synthetic construct
  source 1..57: mol_type = other RNA
gctggggaccgatcctgattgctcgctgcggcgagactcccagcatggcaccagaca

SEQ ID NO: 1131 - RNA, 57 nt, synthetic construct
  source 1..57: mol_type = other RNA
gctggggaccgatcctgattgctcgctgcggcgagacctctgtctggtgccatgctg

SEQ ID NO: 1132 - RNA, 57 nt, synthetic construct
  source 1..57: mol_type = other RNA
gctggggaccgatcctgattgctcgctgcggcgagacgataccagcatccagggtgc

SEQ ID NO: 1133 - RNA, 57 nt, synthetic construct
  source 1..57: mol_type = other RNA
gctggggaccgatcctgattgctcgctgcggcgagacagggcagggtcaccatcacc

SEQ ID NO: 1134 - RNA, 57 nt, synthetic construct
  source 1..57: mol_type = other RNA
gctggggaccgatcctgattgctcgctgcggcgagacaagtcggtgatggtgaccct

SEQ ID NO: 1135 - RNA, 57 nt, synthetic construct
  source 1..57: mol_type = other RNA
gctggggaccgatcctgattgctcgctgcggcgagacaacagcgtgccggaggagga

SEQ ID NO: 1136 - RNA, 57 nt, synthetic construct
  source 1..57: mol_type = other RNA
gctggggaccgatcctgattgctcgctgcggcgagacgccacaccagcatcccggcc

SEQ ID NO: 1137 - RNA, 57 nt, synthetic construct
  source 1..57: mol_type = other RNA
gctggggaccgatcctgattgctcgctgcggcgagacagcacacgcaggctgtgcag

SEQ ID NO: 1138 - RNA, 57 nt, synthetic construct
  source 1..57: mol_type = other RNA
gctggggaccgatcctgattgctcgctgcggcgagacacagttgagcacacgcaggc

SEQ ID NO: 1139 - RNA, 57 nt, synthetic construct
  source 1..57: mol_type = other RNA
gctggggaccgatcctgattgctcgctgcggcgagacccttgacagttgagcacacg

SEQ ID NO: 1140 - RNA, 57 nt, synthetic construct
  source 1..57: mol_type = other RNA
gctggggaccgatcctgattgctcgctgcggcgagacgctgactcttccgaataaac

SEQ ID NO: 1141 - RNA, 57 nt, synthetic construct
  source 1..57: mol_type = other RNA
gctggggaccgatcctgattgctcgctgcggcgagacattcggaagagtcagctaat

SEQ ID NO: 1142 - RNA, 57 nt, synthetic construct
  source 1..57: mol_type = other RNA
gctggggaccgatcctgattgctcgctgcggcgagacttcggaagagtcagctaatc

SEQ ID NO: 1143 - RNA, 57 nt, synthetic construct
  source 1..57: mol_type = other RNA
gctggggaccgatcctgattgctcgctgcggcgagacggaagagtcagctaatccag

SEQ ID NO: 1144 - RNA, 57 nt, synthetic construct
  source 1..57: mol_type = other RNA
gctggggaccgatcctgattgctcgctgcggcgagactgctgcccctggccggtggg

SEQ ID NO: 1145 - RNA, 57 nt, synthetic construct
  source 1..57: mol_type = other RNA
gctggggaccgatcctgattgctcgctgcggcgagacaggatgcggctatacccacc

SEQ ID NO: 1146 - RNA, 57 nt, synthetic construct
  source 1..57: mol_type = other RNA
gctggggaccgatcctgattgctcgctgcggcgagacccagctgctgcaaccagcac

SEQ ID NO: 1147 - RNA, 57 nt, synthetic construct
  source 1..57: mol_type = other RNA
gctggggaccgatcctgattgctcgctgcggcgagaccagcagctgggaacttccgg

SEQ ID NO: 1148 - RNA, 57 nt, synthetic construct
  source 1..57: mol_type = other RNA
gctggggaccgatcctgattgctcgctgcggcgagaccgggacgacgcctgcctcta

SEQ ID NO: 1149 - RNA, 57 nt, synthetic construct
  source 1..57: mol_type = other RNA
gctggggaccgatcctgattgctcgctgcggcgagacgtggccccgactgtgatgac

SEQ ID NO: 1150 - RNA, 57 nt, synthetic construct
  source 1..57: mol_type = other RNA
gctggggaccgatcctgattgctcgctgcggcgagacccttggggactttggggact

SEQ ID NO: 1151 - RNA, 57 nt, synthetic construct
  source 1..57: mol_type = other RNA
gctggggaccgatcctgattgctcgctgcggcgagacgtccccaaagtccccaaggt

SEQ ID NO: 1152 - RNA, 57 nt, synthetic construct
  source 1..57: mol_type = other RNA
gctggggaccgatcctgattgctcgctgcggcgagacgggactttggggactaattt

SEQ ID NO: 1153 - RNA, 57 nt, synthetic construct
  source 1..57: mol_type = other RNA
gctggggaccgatcctgattgctcgctgcggcgagacggggactaattttggacgct

SEQ ID NO: 1154 - RNA, 57 nt, synthetic construct
  source 1..57: mol_type = other RNA
gctggggaccgatcctgattgctcgctgcggcgagacgggactaattttggacgctg

SEQ ID NO: 1155 - RNA, 57 nt, synthetic construct
  source 1..57: mol_type = other RNA
gctggggaccgatcctgattgctcgctgcggcgagactggacgctgtgtggatctct

SEQ ID NO: 1156 - RNA, 57 nt, synthetic construct
  source 1..57: mol_type = other RNA
gctggggaccgatcctgattgctcgctgcggcgagacggacgctgtgtggatctctt

SEQ ID NO: 1157 - RNA, 57 nt, synthetic construct
  source 1..57: mol_type = other RNA
gctggggaccgatcctgattgctcgctgcggcgagacgacgctgtgtggatctcttt

SEQ ID NO: 1158 - RNA, 57 nt, synthetic construct
  source 1..57: mol_type = other RNA
gctggggaccgatcctgattgctcgctgcggcgagacccgggggcaaagagatccac

SEQ ID NO: 1159 - RNA, 57 nt, synthetic construct
  source 1..57: mol_type = other RNA
gctggggaccgatcctgattgctcgctgcggcgagacgcccccgggaaggacatcat

SEQ ID NO: 1160 - RNA, 57 nt, synthetic construct
  source 1..57: mol_type = other RNA
gctggggaccgatcctgattgctcgctgcggcgagaccccccgggaaggacatcatc

SEQ ID NO: 1161 - RNA, 57 nt, synthetic construct
  source 1..57: mol_type = other RNA
gctggggaccgatcctgattgctcgctgcggcgagacatgtcacagagtgggacctc

SEQ ID NO: 1162 - RNA, 57 nt, synthetic construct
  source 1..57: mol_type = other RNA
gctggggaccgatcctgattgctcgctgcggcgagactggctcggatgctgagccgg

SEQ ID NO: 1163 - RNA, 57 nt, synthetic construct
  source 1..57: mol_type = other RNA
gctggggaccgatcctgattgctcgctgcggcgagacccctggccgagctgcggcag

SEQ ID NO: 1164 - RNA, 57 nt, synthetic construct
  source 1..57: mol_type = other RNA
gctggggaccgatcctgattgctcgctgcggcgagacgtagagaagtggatcagcct

SEQ ID NO: 1165 - RNA, 57 nt, synthetic construct
  source 1..57: mol_type = other RNA
gctggggaccgatcctgattgctcgctgcggcgagacggtagagaagtggatcagcc

SEQ ID NO: 1166 - RNA, 57 nt, synthetic construct
  source 1..57: mol_type = other RNA
gctggggaccgatcctgattgctcgctgcggcgagactctaccaaagacgtcatcaa

SEQ ID NO: 1167 - RNA, 57 nt, synthetic construct
  source 1..57: mol_type = other RNA
gctggggaccgatcctgattgctcgctgcggcgagacatgacgtctttggtagagaa

SEQ ID NO: 1168 - RNA, 57 nt, synthetic construct
  source 1..57: mol_type = other RNA
gctggggaccgatcctgattgctcgctgcggcgagaccctgaggaccagcaggtgct

SEQ ID NO: 1169 - RNA, 57 nt, synthetic construct
  source 1..57: mol_type = other RNA
gctggggaccgatcctgattgctcgctgcggcgagacggggtcagcacctgctggtc

SEQ ID NO: 1170 - RNA, 57 nt, synthetic construct
  source 1..57: mol_type = other RNA
gctggggaccgatcctgattgctcgctgcggcgagacgagtgggccccgagtgtgcc

SEQ ID NO: 1171 - RNA, 57 nt, synthetic construct
  source 1..57: mol_type = other RNA
gctggggaccgatcctgattgctcgctgcggcgagactggggcacagcgggctgtag

SEQ ID NO: 1172 - RNA, 57 nt, synthetic construct
  source 1..57: mol_type = other RNA
gctggggaccgatcctgattgctcgctgcggcgagactccaggagcgggaggcgtcg

SEQ ID NO: 1173 - RNA, 57 nt, synthetic construct
  source 1..57: mol_type = other RNA
gctggggaccgatcctgattgctcgctgcggcgagaccagacctgctggcctcctat

SEQ ID NO: 1174 - RNA, 57 nt, synthetic construct
  source 1..57: mol_type = other RNA
gctggggaccgatcctgattgctcgctgcggcgagacagggccttgcagacctgctg

SEQ ID NO: 1175 - RNA, 57 nt, synthetic construct
  source 1..57: mol_type = other RNA
gctggggaccgatcctgattgctcgctgcggcgagacgggggtgagggtgtctatgc

SEQ ID NO: 1176 - RNA, 57 nt, synthetic construct
  source 1..57: mol_type = other RNA
gctggggaccgatcctgattgctcgctgcggcgagacggggtgagggtgtctatgcc

SEQ ID NO: 1177 - RNA, 57 nt, synthetic construct
  source 1..57: mol_type = other RNA
gctggggaccgatcctgattgctcgctgcggcgagacgcacggggaaccaggcagca

SEQ ID NO: 1178 - RNA, 57 nt, synthetic construct
  source 1..57: mol_type = other RNA
gctggggaccgatcctgattgctcgctgcggcgagaccccgtgccaactgcagcatc

SEQ ID NO: 1179 - RNA, 57 nt, synthetic construct
  source 1..57: mol_type = other RNA
gctggggaccgatcctgattgctcgctgcggcgagactggatgctgcagttggcacg

SEQ ID NO: 1180 - RNA, 57 nt, synthetic construct
  source 1..57: mol_type = other RNA
gctggggaccgatcctgattgctcgctgcggcgagactggtggcagtggacatgggt

SEQ ID NO: 1181 - RNA, 57 nt, synthetic construct
  source 1..57: mol_type = other RNA
gctggggaccgatcctgattgctcgctgcggcgagaccacttcccaatggaagctgc

SEQ ID NO: 1182 - RNA, 57 nt, synthetic construct
  source 1..57: mol_type = other RNA
gctggggaccgatcctgattgctcgctgcggcgagaccattgggaagtggaagacct

SEQ ID NO: 1183 - RNA, 57 nt, synthetic construct
  source 1..57: mol_type = other RNA
gctggggaccgatcctgattgctcgctgcggcgagacggaagtggaagaccttagtg

SEQ ID NO: 1184 - RNA, 57 nt, synthetic construct
  source 1..57: mol_type = other RNA
gctggggaccgatcctgattgctcgctgcggcgagacgtgtccggaggcagcctgcg

SEQ ID NO: 1185 - RNA, 57 nt, synthetic construct
  source 1..57: mol_type = other RNA
gctggggaccgatcctgattgctcgctgcggcgagacgccaccaggcggccagtgtc

SEQ ID NO: 1186 - RNA, 57 nt, synthetic construct
  source 1..57: mol_type = other RNA
gctggggaccgatcctgattgctcgctgcggcgagacctgctgccatgccccagggc

SEQ ID NO: 1187 - RNA, 57 nt, synthetic construct
  source 1..57: mol_type = other RNA
gctggggaccgatcctgattgctcgctgcggcgagaccagccctggggcatggcagc

SEQ ID NO: 1188 - RNA, 57 nt, synthetic construct
  source 1..57: mol_type = other RNA
gctggggaccgatcctgattgctcgctgcggcgagaccattccagccctggggcatg

SEQ ID NO: 1189 - RNA, 57 nt, synthetic construct
  source 1..57: mol_type = other RNA
gctggggaccgatcctgattgctcgctgcggcgagacgcattccagccctggggcat

SEQ ID NO: 1190 - RNA, 57 nt, synthetic construct
  source 1..57: mol_type = other RNA
gctggggaccgatcctgattgctcgctgcggcgagactgcattccagccctggggca

SEQ ID NO: 1191 - RNA, 57 nt, synthetic construct
  source 1..57: mol_type = other RNA
gctggggaccgatcctgattgctcgctgcggcgagacattttgcattccagccctgg

SEQ ID NO: 1192 - RNA, 57 nt, synthetic construct
  source 1..57: mol_type = other RNA
gctggggaccgatcctgattgctcgctgcggcgagaccatccagtcagggtccatcc

SEQ ID NO: 1193 - RNA, 57 nt, synthetic construct
  source 1..57: mol_type = other RNA
gctggggaccgatcctgattgctcgctgcggcgagactccacgctgtaggctcccag

SEQ ID NO: 1194 - RNA, 57 nt, synthetic construct
  source 1..57: mol_type = other RNA
gctggggaccgatcctgattgctcgctgcggcgagacccacacacaggttgtccacg

SEQ ID NO: 1195 - RNA, 57 nt, synthetic construct
  source 1..57: mol_type = other RNA
gctggggaccgatcctgattgctcgctgcggcgagactccactggtcctgtctgctc

SEQ ID NO: 1196 - RNA, 57 nt, synthetic construct
  source 1..57: mol_type = other RNA
gctggggaccgatcctgattgctcgctgcggcgagacctgaaggccggctccggcag

SEQ ID NO: 1197 - DNA, 56 bp, synthetic construct
  source 1..56: mol_type = other DNA
ctttcaagactaatagattgctccttacgaggagacgaagctatgttttccatctc

SEQ ID NO: 1198 - DNA, 56 bp, synthetic construct
  source 1..56: mol_type = other DNA
ctttcaagactaatagattgctccttacgaggagacgcaggggcagccgccccctg

SEQ ID NO: 1199 - DNA, 56 bp, synthetic construct
  source 1..56: mol_type = other DNA
ctttcaagactaatagattgctccttacgaggagacctcctagaacccaacaggta

SEQ ID NO: 1200 - DNA, 56 bp, synthetic construct
  source 1..56: mol_type = other DNA
ctttcaagactaatagattgctccttacgaggagacgaaagacctcctctgtgtcc

SEQ ID NO: 1201 - DNA, 56 bp, synthetic construct
  source 1..56: mol_type = other DNA
ctttcaagactaatagattgctccttacgaggagactccatctcggggttggcagg

SEQ ID NO: 1202 - DNA, 56 bp, synthetic construct
  source 1..56: mol_type = other DNA
ctttcaagactaatagattgctccttacgaggagacttcctgatggtggagatgga

SEQ ID NO: 1203 - DNA, 56 bp, synthetic construct
  source 1..56: mol_type = other DNA
ctttcaagactaatagattgctccttacgaggagacctgactcccagctctgaccc

SEQ ID NO: 1204 - DNA, 56 bp, synthetic construct
  source 1..56: mol_type = other DNA
ctttcaagactaatagattgctccttacgaggagactggggtcagagctgggagtc

SEQ ID NO: 1205 - DNA, 56 bp, synthetic construct; identical to SEQ ID NO: 1200
  source 1..56: mol_type = other DNA

SEQ ID NO: 1206 - DNA, 56 bp, synthetic construct
  source 1..56: mol_type = other DNA
ctttcaagactaatagattgctccttacgaggagaccgaagctatgttttccatct

SEQ ID NO: 1207 - DNA, 56 bp, synthetic construct; identical to SEQ ID NO: 1197
  source 1..56: mol_type = other DNA

SEQ ID NO: 1208 - DNA, 56 bp, synthetic construct
  source 1..56: mol_type = other DNA
ctttcaagactaatagattgctccttacgaggagactccatctccaccatcaggaa

SEQ ID NO: 1209 - DNA, 56 bp, synthetic construct
  source 1..56: mol_type = other DNA
ctttcaagactaatagattgctccttacgaggagacccatctccaccatcaggaac

SEQ ID NO: 1210 - DNA, 56 bp, synthetic construct
  source 1..56: mol_type = other DNA
ctttcaagactaatagattgctccttacgaggagacctgatggtggagatggaaaa

SEQ ID NO: 1211 - DNA, 56 bp, synthetic construct
  source 1..56: mol_type = other DNA
ctttcaagactaatagattgctccttacgaggagaccatctccaccatcaggaaca

SEQ ID NO: 1212 - DNA, 56 bp, synthetic construct; identical to SEQ ID NO: 1202
  source 1..56: mol_type = other DNA

SEQ ID NO: 1213 - DNA, 56 bp, synthetic construct; identical to SEQ ID NO: 1198
  source 1..56: mol_type = other DNA

SEQ ID NO: 1214 - DNA, 56 bp, synthetic construct; identical to SEQ ID NO: 1201
  source 1..56: mol_type = other DNA

SEQ ID NO: 1215 - DNA, 56 bp, synthetic construct
  source 1..56: mol_type = other DNA
ctttcaagactaatagattgctccttacgaggagactaggagcaaattgtccatct

SEQ ID NO: 1216 - DNA, 56 bp, synthetic construct
  source 1..56: mol_type = other DNA
ctttcaagactaatagattgctccttacgaggagacggttctaggagcaaattgtc

SEQ ID NO: 1217 - DNA, 56 bp, synthetic construct
  source 1..56: mol_type = other DNA
ctttcaagactaatagattgctccttacgaggagacgctcctagaacccaacaggt

SEQ ID NO: 1218 - DNA, 56 bp, synthetic construct; identical to SEQ ID NO: 1199
  source 1..56: mol_type = other DNA

SEQ ID NO: 1219 - DNA, 56 bp, synthetic construct
  source 1..56: mol_type = other DNA
ctttcaagactaatagattgctccttacgaggagactccagacgccatctttcagg

SEQ ID NO: 1220 - DNA, 56 bp, synthetic construct
  source 1..56: mol_type = other DNA
ctttcaagactaatagattgctccttacgaggagactggtaagagtcctcctgccc

SEQ ID NO: 1221 - DNA, 56 bp, synthetic construct
  source 1..56: mol_type = other DNA
ctttcaagactaatagattgctccttacgaggagacttacagcatcttgggtcagg

SEQ ID NO: 1222 - DNA, 56 bp, synthetic construct
  source 1..56: mol_type = other DNA
ctttcaagactaatagattgctccttacgaggagacggtcaggtgggccggcagct

SEQ ID NO: 1223 - DNA, 56 bp, synthetic construct
  source 1..56: mol_type = other DNA
ctttcaagactaatagattgctccttacgaggagacctatcattggagatgacatt

SEQ ID NO: 1224 - DNA, 56 bp, synthetic construct
  source 1..56: mol_type = other DNA
ctttcaagactaatagattgctccttacgaggagacgagatgacattaaccggaga

SEQ ID NO: 1225 - DNA, 56 bp, synthetic construct
  source 1..56: mol_type = other DNA
ctttcaagactaatagattgctccttacgaggagactggaactctgtgtcgtatct

SEQ ID NO: 1226 - DNA, 56 bp, synthetic construct
  source 1..56: mol_type = other DNA
ctttcaagactaatagattgctccttacgaggagaccagaatttactggagcagct

SEQ ID NO: 1227 - DNA, 56 bp, synthetic construct
  source 1..56: mol_type = other DNA
ctttcaagactaatagattgctccttacgaggagacactggagcagctgcagccca

SEQ ID NO: 1228 - DNA, 56 bp, synthetic construct
  source 1..56: mol_type = other DNA
ctttcaagactaatagattgctccttacgaggagacccagctgtgggctgcagctg

SEQ ID NO: 1229 - DNA, 56 bp, synthetic construct
  source 1..56: mol_type = other DNA
ctttcaagactaatagattgctccttacgaggagacgtaggcattcccagctgtgg

SEQ ID NO: 1230 - DNA, 56 bp, synthetic construct
  source 1..56: mol_type = other DNA
ctttcaagactaatagattgctccttacgaggagacgtgaagagttcgtaggcatt

SEQ ID NO: 1231 - DNA, 56 bp, synthetic construct
  source 1..56: mol_type = other DNA
ctttcaagactaatagattgctccttacgaggagacaccaagattgcctccaggta

SEQ ID NO: 1232 - DNA, 56 bp, synthetic construct
  source 1..56: mol_type = other DNA
ctttcaagactaatagattgctccttacgaggagaccctccaggtacccaccacca

SEQ ID NO: 1233 - DNA, 57 bp, synthetic construct
  source 1..57: mol_type = other DNA
gctggggaccgatcctgattgctcgctgcggcgagacgaagctatgttttccatctc

SEQ ID NO: 1234 - DNA, 57 bp, synthetic construct
  source 1..57: mol_type = other DNA
gctggggaccgatcctgattgctcgctgcggcgagacgcaggggcagccgccccctg

SEQ ID NO: 1235 - DNA, 57 bp, synthetic construct
  source 1..57: mol_type = other DNA
gctggggaccgatcctgattgctcgctgcggcgagacctcctagaacccaacaggta

SEQ ID NO: 1236 - DNA, 57 bp, synthetic construct
  source 1..57: mol_type = other DNA
gctggggaccgatcctgattgctcgctgcggcgagacgaaagacctcctctgtgtcc

SEQ ID NO: 1237 - DNA, 57 bp, synthetic construct
  source 1..57: mol_type = other DNA
gctggggaccgatcctgattgctcgctgcggcgagactccatctcggggttggcagg

SEQ ID NO: 1238 - DNA, 57 bp, synthetic construct
  source 1..57: mol_type = other DNA
gctggggaccgatcctgattgctcgctgcggcgagacttcctgatggtggagatgga

SEQ ID NO: 1239 - DNA, 57 bp, synthetic construct
  source 1..57: mol_type = other DNA
gctggggaccgatcctgattgctcgctgcggcgagacctgactcccagctctgaccc

SEQ ID NO: 1240 - DNA, 57 bp, synthetic construct
  source 1..57: mol_type = other DNA
gctggggaccgatcctgattgctcgctgcggcgagactggggtcagagctgggagtc

SEQ ID NO: 1241 - DNA, 57 bp, synthetic construct; identical to SEQ ID NO: 1236
  source 1..57: mol_type = other DNA

SEQ ID NO: 1242 - DNA, 57 bp, synthetic construct
  source 1..57: mol_type = other DNA
gctggggaccgatcctgattgctcgctgcggcgagaccgaagctatgttttccatct

SEQ ID NO: 1243 - DNA, 57 bp, synthetic construct; identical to SEQ ID NO: 1233
  source 1..57: mol_type = other DNA

SEQ ID NO: 1244 - DNA, 57 bp, synthetic construct
  source 1..57: mol_type = other DNA
gctggggaccgatcctgattgctcgctgcggcgagactccatctccaccatcaggaa

SEQ ID NO: 1245 - DNA, 57 bp, synthetic construct
  source 1..57: mol_type = other DNA
gctggggaccgatcctgattgctcgctgcggcgagacccatctccaccatcaggaac

SEQ ID NO: 1246 - DNA, 57 bp, synthetic construct
  source 1..57: mol_type = other DNA
gctggggaccgatcctgattgctcgctgcggcgagacctgatggtggagatggaaaa

SEQ ID NO: 1247 - DNA, 57 bp, synthetic construct
  source 1..57: mol_type = other DNA
gctggggaccgatcctgattgctcgctgcggcgagaccatctccaccatcaggaaca

SEQ ID NO: 1248 - DNA, 57 bp, synthetic construct; identical to SEQ ID NO: 1238
  source 1..57: mol_type = other DNA

SEQ ID NO: 1249 - DNA, 57 bp, synthetic construct; identical to SEQ ID NO: 1234
  source 1..57: mol_type = other DNA

SEQ ID NO: 1250 - DNA, 57 bp, synthetic construct; identical to SEQ ID NO: 1237
  source 1..57: mol_type = other DNA

SEQ ID NO: 1251 - DNA, 57 bp, synthetic construct
  source 1..57: mol_type = other DNA
gctggggaccgatcctgattgctcgctgcggcgagactaggagcaaattgtccatct

SEQ ID NO: 1252 - DNA, 57 bp, synthetic construct
  source 1..57: mol_type = other DNA
gctggggaccgatcctgattgctcgctgcggcgagacggttctaggagcaaattgtc

SEQ ID NO: 1253 - DNA, 57 bp, synthetic construct
  source 1..57: mol_type = other DNA
gctggggaccgatcctgattgctcgctgcggcgagacgctcctagaacccaacaggt

SEQ ID NO: 1254 - DNA, 57 bp, synthetic construct; identical to SEQ ID NO: 1235
  source 1..57: mol_type = other DNA

SEQ ID NO: 1255 - DNA, 57 bp, synthetic construct
  source 1..57: mol_type = other DNA
gctggggaccgatcctgattgctcgctgcggcgagactccagacgccatctttcagg

SEQ ID NO: 1256 - DNA, 57 bp, synthetic construct
  source 1..57: mol_type = other DNA
gctggggaccgatcctgattgctcgctgcggcgagactggtaagagtcctcctgccc

SEQ ID NO: 1257 - DNA, 57 bp, synthetic construct
  source 1..57: mol_type = other DNA
gctggggaccgatcctgattgctcgctgcggcgagacttacagcatcttgggtcagg

SEQ ID NO: 1258 - DNA, 57 bp, synthetic construct
  source 1..57: mol_type = other DNA
gctggggaccgatcctgattgctcgctgcggcgagacggtcaggtgggccggcagct

SEQ ID NO: 1259 - DNA, 57 bp, synthetic construct
  source 1..57: mol_type = other DNA
gctggggaccgatcctgattgctcgctgcggcgagacctatcattggagatgacatt

SEQ ID NO: 1260 - DNA, 57 bp, synthetic construct
  source 1..57: mol_type = other DNA
gctggggaccgatcctgattgctcgctgcggcgagacgagatgacattaaccggaga

SEQ ID NO: 1261 - DNA, 57 bp, synthetic construct
  source 1..57: mol_type = other DNA
gctggggaccgatcctgattgctcgctgcggcgagactggaactctgtgtcgtatct

SEQ ID NO: 1262 - DNA, 57 bp, synthetic construct
  source 1..57: mol_type = other DNA
gctggggaccgatcctgattgctcgctgcggcgagaccagaatttactggagcagct

SEQ ID NO: 1263 - DNA, 57 bp, synthetic construct
  source 1..57: mol_type = other DNA
gctggggaccgatcctgattgctcgctgcggcgagacactggagcagctgcagccca

SEQ ID NO: 1264 - DNA, 57 bp, synthetic construct
  source 1..57: mol_type = other DNA
gctggggaccgatcctgattgctcgctgcggcgagacccagctgtgggctgcagctg

SEQ ID NO: 1265 - DNA, 57 bp, synthetic construct
  source 1..57: mol_type = other DNA
gctggggaccgatcctgattgctcgctgcggcgagacgtaggcattcccagctgtgg

SEQ ID NO: 1266 - DNA, 57 bp, synthetic construct
  source 1..57: mol_type = other DNA
gctggggaccgatcctgattgctcgctgcggcgagacgtgaagagttcgtaggcatt

SEQ ID NO: 1267 - DNA, 57 bp, synthetic construct
  source 1..57: mol_type = other DNA
gctggggaccgatcctgattgctcgctgcggcgagacaccaagattgcctccaggta

SEQ ID NO: 1268 - DNA, 57 bp, synthetic construct
  source 1..57: mol_type = other DNA
gctggggaccgatcctgattgctcgctgcggcgagaccctccaggtacccaccacca

SEQ ID NO: 1269 - DNA, 56 bp, synthetic construct
  source 1..56: mol_type = other DNA
ctttcaagactaatagattgctccttacgaggagacctaatgtggatactaactcc

SEQ ID NO: 1270 - DNA, 56 bp, synthetic construct
  source 1..56: mol_type = other DNA
ctttcaagactaatagattgctccttacgaggagacttccgtgtggcagctgacat

SEQ ID NO: 1271 - DNA, 56 bp, synthetic construct
  source 1..56: mol_type = other DNA
ctttcaagactaatagattgctccttacgaggagacctgatggcaacttcaactgg

SEQ ID NO: 1272 - DNA, 56 bp, synthetic construct
  source 1..56: mol_type = other DNA
ctttcaagactaatagattgctccttacgaggagactactttgctagcaaactggt

SEQ ID NO: 1273 - DNA, 56 bp, synthetic construct
  source 1..56: mol_type = other DNA
ctttcaagactaatagattgctccttacgaggagacagcaccagtttgctagcaaa

SEQ ID NO: 1274 - DNA, 56 bp, synthetic construct
  source 1..56: mol_type = other DNA
ctttcaagactaatagattgctccttacgaggagacaactggggccgggttgttgc

SEQ ID NO: 1275 - DNA, 56 bp, synthetic construct
  source 1..56: mol_type = other DNA
ctttcaagactaatagattgctccttacgaggagacttctctttcctgtaggatga

SEQ ID NO: 1276 - DNA, 56 bp, synthetic construct
  source 1..56: mol_type = other DNA
ctttcaagactaatagattgctccttacgaggagactctttcctgtaggatgattg

SEQ ID NO: 1277 - DNA, 56 bp, synthetic construct
  source 1..56: mol_type = other DNA
ctttcaagactaatagattgctccttacgaggagaccctgtaggatgattgctaat

SEQ ID NO: 1278 - DNA, 56 bp, synthetic construct
  source 1..56: mol_type = other DNA
ctttcaagactaatagattgctccttacgaggagacctgtaggatgattgctaatg

SEQ ID NO: 1279 - DNA, 56 bp, synthetic construct; identical to SEQ ID NO: 1269
  source 1..56: mol_type = other DNA

SEQ ID NO: 1280 - DNA, 56 bp, synthetic construct; identical to SEQ ID NO: 1270
  source 1..56: mol_type = other DNA

SEQ ID NO: 1281 - DNA, 56 bp, synthetic construct
  source 1..56: mol_type = other DNA
ctttcaagactaatagattgctccttacgaggagaccgtgtggcagctgacatgtt

SEQ ID NO: 1282 - DNA, 56 bp, synthetic construct
  source 1..56: mol_type = other DNA
ctttcaagactaatagattgctccttacgaggagacccatcagcaaacatgtcagc

SEQ ID NO: 1283 - DNA, 56 bp, synthetic construct
  source 1..56: mol_type = other DNA
ctttcaagactaatagattgctccttacgaggagacaagttgccatcagcaaacat

SEQ ID NO: 1284 - DNA, 56 bp, synthetic construct
  source 1..56: mol_type = other DNA
ctttcaagactaatagattgctccttacgaggagacgctgatggcaacttcaactg

SEQ ID NO: 1285 - DNA, 56 bp, synthetic construct; identical to SEQ ID NO: 1271
  source 1..56: mol_type = other DNA

SEQ ID NO: 1286 - DNA, 56 bp, synthetic construct; identical to SEQ ID NO: 1274
  source 1..56: mol_type = other DNA

SEQ ID NO: 1287 - DNA, 56 bp, synthetic construct
  source 1..56: mol_type = other DNA
ctttcaagactaatagattgctccttacgaggagacttgcccttttctactttgct

SEQ ID NO: 1288 - DNA, 56 bp, synthetic construct
  source 1..56: mol_type = other DNA
ctttcaagactaatagattgctccttacgaggagaccccttttctactttgctagc

SEQ ID NO: 1289 - DNA, 56 bp, synthetic construct
  source 1..56: mol_type = other DNA
ctttcaagactaatagattgctccttacgaggagacctagcaaagtagaaaagggc

SEQ ID NO: 1290 - DNA, 56 bp, synthetic construct
  source 1..56: mol_type = other DNA
ctttcaagactaatagattgctccttacgaggagacgctagcaaagtagaaaaggg

SEQ ID NO: 1291 - DNA, 56 bp, synthetic construct
  source 1..56: mol_type = other DNA
ctttcaagactaatagattgctccttacgaggagactctactttgctagcaaactg

SEQ ID NO: 1292 - DNA, 56 bp, synthetic construct
  source 1..56: mol_type = other DNA
ctttcaagactaatagattgctccttacgaggagacctactttgctagcaaactgg

SEQ ID NO: 1293 - DNA, 56 bp, synthetic construct; identical to SEQ ID NO: 1272
  source 1..56: mol_type = other DNA

SEQ ID NO: 1294 - DNA, 56 bp, synthetic construct
  source 1..56: mol_type = other DNA
ctttcaagactaatagattgctccttacgaggagacgctagcaaactggtgctcaa

SEQ ID NO: 1295 - DNA, 56 bp, synthetic construct
  source 1..56: mol_type = other DNA
ctttcaagactaatagattgctccttacgaggagacctagcaaactggtgctcaag

SEQ ID NO: 1296 - DNA, 56 bp, synthetic construct; identical to SEQ ID NO: 1273
  source 1..56: mol_type = other DNA

SEQ ID NO: 1297 - DNA, 57 bp, synthetic construct
  source 1..57: mol_type = other DNA
gctggggaccgatcctgattgctcgctgcggcgagacctaatgtggatactaactcc

SEQ ID NO: 1298 - DNA, 57 bp, synthetic construct
  source 1..57: mol_type = other DNA
gctggggaccgatcctgattgctcgctgcggcgagacttccgtgtggcagctgacat

SEQ ID NO: 1299 - DNA, 57 bp, synthetic construct
  source 1..57: mol_type = other DNA
gctggggaccgatcctgattgctcgctgcggcgagacctgatggcaacttcaactgg

SEQ ID NO: 1300 - DNA, 57 bp, synthetic construct
  source 1..57: mol_type = other DNA
gctggggaccgatcctgattgctcgctgcggcgagactactttgctagcaaactggt

SEQ ID NO: 1301 - DNA, 57 bp, synthetic construct
  source 1..57: mol_type = other DNA
gctggggaccgatcctgattgctcgctgcggcgagacagcaccagtttgctagcaaa

SEQ ID NO: 1302 - DNA, 57 bp, synthetic construct
  source 1..57: mol_type = other DNA
gctggggaccgatcctgattgctcgctgcggcgagacaactggggccgggttgttgc

SEQ ID NO: 1303 - DNA, 57 bp, synthetic construct
  source 1..57: mol_type = other DNA
gctggggaccgatcctgattgctcgctgcggcgagacttctctttcctgtaggatga

SEQ ID NO: 1304 - DNA, 57 bp, synthetic construct
  source 1..57: mol_type = other DNA
gctggggaccgatcctgattgctcgctgcggcgagactctttcctgtaggatgattg

SEQ ID NO: 1305 - DNA, 57 bp, synthetic construct
  source 1..57: mol_type = other DNA
gctggggaccgatcctgattgctcgctgcggcgagaccctgtaggatgattgctaat

SEQ ID NO: 1306 - DNA, 57 bp, synthetic construct
  source 1..57: mol_type = other DNA
gctggggaccgatcctgattgctcgctgcggcgagacctgtaggatgattgctaatg

SEQ ID NO: 1307 - DNA, 57 bp, synthetic construct; identical to SEQ ID NO: 1297
  source 1..57: mol_type = other DNA

SEQ ID NO: 1308 - DNA, 57 bp, synthetic construct; identical to SEQ ID NO: 1298
  source 1..57: mol_type = other DNA

SEQ ID NO: 1309 - DNA, 57 bp, synthetic construct
  source 1..57: mol_type = other DNA
gctggggaccgatcctgattgctcgctgcggcgagaccgtgtggcagctgacatgtt

SEQ ID NO: 1310 - DNA, 57 bp, synthetic construct
  source 1..57: mol_type = other DNA
gctggggaccgatcctgattgctcgctgcggcgagacccatcagcaaacatgtcagc

SEQ ID NO: 1311 - DNA, 57 bp, synthetic construct
  source 1..57: mol_type = other DNA
gctggggaccgatcctgattgctcgctgcggcgagacaagttgccatcagcaaacat

SEQ ID NO: 1312 - DNA, 57 bp, synthetic construct
  source 1..57: mol_type = other DNA
gctggggaccgatcctgattgctcgctgcggcgagacgctgatggcaacttcaactg

SEQ ID NO: 1313 - DNA, 57 bp, synthetic construct; identical to SEQ ID NO: 1299
  source 1..57: mol_type = other DNA

SEQ ID NO: 1314 - DNA, 57 bp, synthetic construct; identical to SEQ ID NO: 1302
  source 1..57: mol_type = other DNA

SEQ ID NO: 1315 - DNA, 57 bp, synthetic construct
  source 1..57: mol_type = other DNA
gctggggaccgatcctgattgctcgctgcggcgagacttgcccttttctactttgct

SEQ ID NO: 1316 - DNA, 57 bp, synthetic construct
  source 1..57: mol_type = other DNA
gctggggaccgatcctgattgctcgctgcggcgagaccccttttctactttgctagc

SEQ ID NO: 1317 - DNA, 57 bp, synthetic construct
  source 1..57: mol_type = other DNA
gctggggaccgatcctgattgctcgctgcggcgagacctagcaaagtagaaaagggc

SEQ ID NO: 1318 - DNA, 57 bp, synthetic construct
  source 1..57: mol_type = other DNA
gctggggaccgatcctgattgctcgctgcggcgagacgctagcaaagtagaaaaggg

SEQ ID NO: 1319 - DNA, 57 bp, synthetic construct
  source 1..57: mol_type = other DNA
gctggggaccgatcctgattgctcgctgcggcgagactctactttgctagcaaactg

SEQ ID NO: 1320 - DNA, 57 bp, synthetic construct
  source 1..57: mol_type = other DNA
gctggggaccgatcctgattgctcgctgcggcgagacctactttgctagcaaactgg

SEQ ID NO: 1321 - DNA, 57 bp, synthetic construct; identical to SEQ ID NO: 1300
  source 1..57: mol_type = other DNA

SEQ ID NO: 1322 - DNA, 57 bp, synthetic construct
  source 1..57: mol_type = other DNA
gctggggaccgatcctgattgctcgctgcggcgagacgctagcaaactggtgctcaa

SEQ ID NO: 1323 - DNA, 57 bp, synthetic construct
  source 1..57: mol_type = other DNA
gctggggaccgatcctgattgctcgctgcggcgagacctagcaaactggtgctcaag

SEQ ID NO: 1324 - DNA, 57 bp, synthetic construct; identical to SEQ ID NO: 1301
  source 1..57: mol_type = other DNA

SEQ ID NO: 1325 - DNA, 56 bp, synthetic construct
  source 1..56: mol_type = other DNA
ctttcaagactaatagattgctccttacgaggagacccactttgtcagtgcgtctg

SEQ ID NO: 1326 - DNA, 56 bp, synthetic construct
  source 1..56: mol_type = other DNA
ctttcaagactaatagattgctccttacgaggagacctcaatgggatggaaggctg

SEQ ID NO: 1327 - DNA, 56 bp, synthetic construct
  source 1..56: mol_type = other DNA
ctttcaagactaatagattgctccttacgaggagacaggaatacatggtacacgtt

SEQ ID NO: 1328 - DNA, 56 bp, synthetic construct
  source 1..56: mol_type = other DNA
ctttcaagactaatagattgctccttacgaggagacaagaacattttcagcttctc

SEQ ID NO: 1329 - DNA, 56 bp, synthetic construct
  source 1..56: mol_type = other DNA
ctttcaagactaatagattgctccttacgaggagacatccactttcattctgcgtt

SEQ ID NO: 1330 - DNA, 56 bp, synthetic construct
  source 1..56: mol_type = other DNA
ctttcaagactaatagattgctccttacgaggagactttgttaaaggaggcaaaga

SEQ ID NO: 1331 - DNA, 56 bp, synthetic construct
  source 1..56: mol_type = other DNA
ctttcaagactaatagattgctccttacgaggagactccccagagtccatgtcaga

SEQ ID NO: 1332 - DNA, 56 bp, synthetic construct
  source 1..56: mol_type = other DNA
ctttcaagactaatagattgctccttacgaggagactcagtgcgtctgacatggac

SEQ ID NO: 1333 - DNA, 56 bp, synthetic construct
  source 1..56: mol_type = other DNA
ctttcaagactaatagattgctccttacgaggagacgtcagtgcgtctgacatgga

SEQ ID NO: 1334 - DNA, 56 bp, synthetic construct; identical to SEQ ID NO: 1325
  source 1..56: mol_type = other DNA

SEQ ID NO: 1335 - DNA, 56 bp, synthetic construct
  source 1..56: mol_type = other DNA
ctttcaagactaatagattgctccttacgaggagactgttcccactttgtcagtgc

SEQ ID NO: 1336 - DNA, 56 bp, synthetic construct; identical to SEQ ID NO: 1326
  source 1..56: mol_type = other DNA

SEQ ID NO: 1337 - DNA, 56 bp, synthetic construct
  source 1..56: mol_type = other DNA
ctttcaagactaatagattgctccttacgaggagaccatcccattgaggaatacat

SEQ ID NO: 1338 - DNA, 56 bp, synthetic construct; identical to SEQ ID NO: 1327
  source 1..56: mol_type = other DNA

SEQ ID NO: 1339 - DNA, 56 bp, synthetic construct
  source 1..56: mol_type = other DNA
ctttcaagactaatagattgctccttacgaggagacaacgtgtaccatgtattcct

SEQ ID NO: 1340 - DNA, 56 bp, synthetic construct
  source 1..56: mol_type = other DNA
ctttcaagactaatagattgctccttacgaggagacttcaacgtgtaccatgtatt

SEQ ID NO: 1341 - DNA, 56 bp, synthetic construct; identical to SEQ ID NO: 1328
  source 1..56: mol_type = other DNA

SEQ ID NO: 1342 - DNA, 56 bp, synthetic construct
  source 1..56: mol_type = other DNA
ctttcaagactaatagattgctccttacgaggagacgagaagctgaaaatgttctt

SEQ ID NO: 1343 - DNA, 56 bp, synthetic construct
  source 1..56: mol_type = other DNA
ctttcaagactaatagattgctccttacgaggagactcagcttctcgaacgcagaa

SEQ ID NO: 1344 - DNA, 56 bp, synthetic construct
  source 1..56: mol_type = other DNA
ctttcaagactaatagattgctccttacgaggagaccagcttctcgaacgcagaat

SEQ ID NO: 1345 - DNA, 56 bp, synthetic construct
  source 1..56: mol_type = other DNA
ctttcaagactaatagattgctccttacgaggagactgcgttcgagaagctgaaaa

SEQ ID NO: 1346 - DNA, 56 bp, synthetic construct
  source 1..56: mol_type = other DNA
ctttcaagactaatagattgctccttacgaggagacagcttctcgaacgcagaatg

SEQ ID NO: 1347 - DNA, 56 bp, synthetic construct
  source 1..56: mol_type = other DNA
ctttcaagactaatagattgctccttacgaggagacattctgcgttcgagaagctg

SEQ ID NO: 1348 - DNA, 56 bp, synthetic construct
  source 1..56: mol_type = other DNA
ctttcaagactaatagattgctccttacgaggagaccattctgcgttcgagaagct

SEQ ID NO: 1349 - DNA, 56 bp, synthetic construct
  source 1..56: mol_type = other DNA
ctttcaagactaatagattgctccttacgaggagactcgaacgcagaatgaaagtg

SEQ ID NO: 1350 - DNA, 56 bp, synthetic construct; identical to SEQ ID NO: 1329
  source 1..56: mol_type = other DNA

SEQ ID NO: 1351 - DNA, 56 bp, synthetic construct
  source 1..56: mol_type = other DNA
ctttcaagactaatagattgctccttacgaggagactatccactttcattctgcgt

SEQ ID NO: 1352 - DNA, 56 bp, synthetic construct
  source 1..56: mol_type = other DNA
ctttcaagactaatagattgctccttacgaggagacttatccactttcattctgcg

SEQ ID NO: 1353 - DNA, 56 bp, synthetic construct
  source 1..56: mol_type = other DNA
ctttcaagactaatagattgctccttacgaggagactttatccactttcattctgc

SEQ ID NO: 1354 - DNA, 56 bp, synthetic construct
  source 1..56: mol_type = other DNA
ctttcaagactaatagattgctccttacgaggagacttttatccactttcattctg

SEQ ID NO: 1355 - DNA, 56 bp, synthetic construct
  source 1..56: mol_type = other DNA
ctttcaagactaatagattgctccttacgaggagacaacaaagaagggtcatcagt

SEQ ID NO: 1356 - DNA, 56 bp, synthetic construct
  source 1..56: mol_type = other DNA
ctttcaagactaatagattgctccttacgaggagaccctcctttaacaaagaaggg

SEQ ID NO: 1357 - DNA, 56 bp, synthetic construct
  source 1..56: mol_type = other DNA
ctttcaagactaatagattgctccttacgaggagacgcctcctttaacaaagaagg

SEQ ID NO: 1358 - DNA, 56 bp, synthetic construct; identical to SEQ ID NO: 1330
  source 1..56: mol_type = other DNA

SEQ ID NO: 1359 - DNA, 56 bp, synthetic construct
  source 1..56: mol_type = other DNA
ctttcaagactaatagattgctccttacgaggagacgttaaaggaggcaaagacaa

SEQ ID NO: 1360 - DNA, 56 bp, synthetic construct
  source 1..56: mol_type = other DNA
ctttcaagactaatagattgctccttacgaggagacttaaaggaggcaaagacaaa

SEQ ID NO: 1361 - DNA, 56 bp, synthetic construct
  source 1..56: mol_type = other DNA
ctttcaagactaatagattgctccttacgaggagactctttgcctcctttaacaaa

SEQ ID NO: 1362 - DNA, 56 bp, synthetic construct
  source 1..56: mol_type = other DNA
ctttcaagactaatagattgctccttacgaggagacgtctttgcctcctttaacaa

SEQ ID NO: 1363 - DNA, 56 bp, synthetic construct
  source 1..56: mol_type = other DNA
ctttcaagactaatagattgctccttacgaggagacgtctaacttactttgtcttt

SEQ ID NO: 1364 - DNA, 56 bp, synthetic construct
  source 1..56: mol_type = other DNA
ctttcaagactaatagattgctccttacgaggagacttggtctaacttactttgtc

SEQ ID NO: 1365 - DNA, 57 bp, synthetic construct
  source 1..57: mol_type = other DNA
gctggggaccgatcctgattgctcgctgcggcgagacccactttgtcagtgcgtctg

SEQ ID NO: 1366 - DNA, 57 bp, synthetic construct
  source 1..57: mol_type = other DNA
gctggggaccgatcctgattgctcgctgcggcgagacctcaatgggatggaaggctg

SEQ ID NO: 1367 - DNA, 57 bp, synthetic construct
  source 1..57: mol_type = other DNA
gctggggaccgatcctgattgctcgctgcggcgagacaggaatacatggtacacgtt

SEQ ID NO: 1368 - DNA, 57 bp, synthetic construct
  source 1..57: mol_type = other DNA
gctggggaccgatcctgattgctcgctgcggcgagacaagaacattttcagcttctc

SEQ ID NO: 1369 - DNA, 57 bp, synthetic construct
  source 1..57: mol_type = other DNA
gctggggaccgatcctgattgctcgctgcggcgagacatccactttcattctgcgtt

SEQ ID NO: 1370 - DNA, 57 bp, synthetic construct
  source 1..57: mol_type = other DNA
gctggggaccgatcctgattgctcgctgcggcgagactttgttaaaggaggcaaaga

SEQ ID NO: 1371 - DNA, 57 bp, synthetic construct
  source 1..57: mol_type = other DNA
gctggggaccgatcctgattgctcgctgcggcgagactccccagagtccatgtcaga

SEQ ID NO: 1372 - DNA, 57 bp, synthetic construct
  source 1..57: mol_type = other DNA
gctggggaccgatcctgattgctcgctgcggcgagactcagtgcgtctgacatggac

SEQ ID NO: 1373 - DNA, 57 bp, synthetic construct
  source 1..57: mol_type = other DNA
gctggggaccgatcctgattgctcgctgcggcgagacgtcagtgcgtctgacatgga

SEQ ID NO: 1374 - DNA, 57 bp, synthetic construct; identical to SEQ ID NO: 1365
  source 1..57: mol_type = other DNA

SEQ ID NO: 1375 - DNA, 57 bp, synthetic construct
  source 1..57: mol_type = other DNA
gctggggaccgatcctgattgctcgctgcggcgagactgttcccactttgtcagtgc

SEQ ID NO: 1376 - DNA, 57 bp, synthetic construct; identical to SEQ ID NO: 1366
  source 1..57: mol_type = other DNA

SEQ ID NO: 1377 - DNA, 57 bp, synthetic construct
  source 1..57: mol_type = other DNA
gctggggaccgatcctgattgctcgctgcggcgagaccatcccattgaggaatacat

SEQ ID NO: 1378 - DNA, 57 bp, synthetic construct; identical to SEQ ID NO: 1367
  source 1..57: mol_type = other DNA

SEQ ID NO: 1379 - DNA, 57 bp, synthetic construct
  source 1..57: mol_type = other DNA
gctggggaccgatcctgattgctcgctgcggcgagacaacgtgtaccatgtattcct

SEQ ID NO: 1380 - DNA, 57 bp, synthetic construct
  source 1..57: mol_type = other DNA
gctggggaccgatcctgattgctcgctgcggcgagacttcaacgtgtaccatgtatt

SEQ ID NO: 1381 - DNA, 57 bp, synthetic construct; identical to SEQ ID NO: 1368
  source 1..57: mol_type = other DNA

SEQ ID NO: 1382 - DNA, 57 bp, synthetic construct
  source 1..57: mol_type = other DNA
gctggggaccgatcctgattgctcgctgcggcgagacgagaagctgaaaatgttctt

SEQ ID NO: 1383 - DNA, 57 bp, synthetic construct
  source 1..57: mol_type = other DNA
gctggggaccgatcctgattgctcgctgcggcgagactcagcttctcgaacgcagaa

SEQ ID NO: 1384 - DNA, 57 bp, synthetic construct
  source 1..57: mol_type = other DNA
gctggggaccgatcctgattgctcgctgcggcgagaccagcttctcgaacgcagaat

SEQ ID NO: 1385 - DNA, 57 bp, synthetic construct
  source 1..57: mol_type = other DNA
gctggggaccgatcctgattgctcgctgcggcgagactgcgttcgagaagctgaaaa

SEQ ID NO: 1386 - DNA, 57 bp, synthetic construct
  source 1..57: mol_type = other DNA
gctggggaccgatcctgattgctcgctgcggcgagacagcttctcgaacgcagaatg

SEQ ID NO: 1387 - DNA, 57 bp, synthetic construct
  source 1..57: mol_type = other DNA
gctggggaccgatcctgattgctcgctgcggcgagacattctgcgttcgagaagctg

SEQ ID NO: 1388 - DNA, 57 bp, synthetic construct
  source 1..57: mol_type = other DNA
gctggggaccgatcctgattgctcgctgcggcgagaccattctgcgttcgagaagct

SEQ ID NO: 1389 - DNA, 57 bp, synthetic construct
  source 1..57: mol_type = other DNA
gctggggaccgatcctgattgctcgctgcggcgagactcgaacgcagaatgaaagtg

SEQ ID NO: 1390 - DNA, 57 bp, synthetic construct; identical to SEQ ID NO: 1369
  source 1..57: mol_type = other DNA

SEQ ID NO: 1391 - DNA, 57 bp, synthetic construct
  source 1..57: mol_type = other DNA
gctggggaccgatcctgattgctcgctgcggcgagactatccactttcattctgcgt

SEQ ID NO: 1392 - DNA, 57 bp, synthetic construct
  source 1..57: mol_type = other DNA
gctggggaccgatcctgattgctcgctgcggcgagacttatccactttcattctgcg

SEQ ID NO: 1393 - DNA, 57 bp, synthetic construct
  source 1..57: mol_type = other DNA
gctggggaccgatcctgattgctcgctgcggcgagactttatccactttcattctgc

SEQ ID NO: 1394 - DNA, 57 bp, synthetic construct
  source 1..57: mol_type = other DNA
gctggggaccgatcctgattgctcgctgcggcgagacttttatccactttcattctg

SEQ ID NO: 1395 - DNA, 57 bp, synthetic construct
  source 1..57: mol_type = other DNA
gctggggaccgatcctgattgctcgctgcggcgagacaacaaagaagggtcatcagt

SEQ ID NO: 1396 - DNA, 57 bp, synthetic construct
  source 1..57: mol_type = other DNA
gctggggaccgatcctgattgctcgctgcggcgagaccctcctttaacaaagaaggg

SEQ ID NO: 1397 - DNA, 57 bp, synthetic construct
  source 1..57: mol_type = other DNA
gctggggaccgatcctgattgctcgctgcggcgagacgcctcctttaacaaagaagg

SEQ ID NO: 1398 - DNA, 57 bp, synthetic construct; identical to SEQ ID NO: 1370
  source 1..57: mol_type = other DNA

SEQ ID NO: 1399 - DNA, 57 bp, synthetic construct
  source 1..57: mol_type = other DNA
gctggggaccgatcctgattgctcgctgcggcgagacgttaaaggaggcaaagacaa

SEQ ID NO: 1400 - DNA, 57 bp, synthetic construct
  source 1..57: mol_type = other DNA
gctggggaccgatcctgattgctcgctgcggcgagacttaaaggaggcaaagacaaa

SEQ ID NO: 1401 - DNA, 57 bp, synthetic construct
  source 1..57: mol_type = other DNA
gctggggaccgatcctgattgctcgctgcggcgagactctttgcctcctttaacaaa

SEQ ID NO: 1402 - DNA, 57 bp, synthetic construct
  source 1..57: mol_type = other DNA
gctggggaccgatcctgattgctcgctgcggcgagacgtctttgcctcctttaacaa

SEQ ID NO: 1403 - DNA, 57 bp, synthetic construct
  source 1..57: mol_type = other DNA
gctggggaccgatcctgattgctcgctgcggcgagacgtctaacttactttgtcttt

SEQ ID NO: 1404 - DNA, 57 bp, synthetic construct
  source 1..57: mol_type = other DNA
gctggggaccgatcctgattgctcgctgcggcgagacttggtctaacttactttgtc

SEQ ID NO: 1405 - DNA, 2271 bp, synthetic construct
  source 1..2271: mol_type = other DNA
atgcctaagcctgccgtggaaagcgagttcagcaaggtgctgaagaagcacttccccggcgagcggttcagatccagctacatgaagagaggcggcaagatcctggccgctcaaggcgaagaagccgtggtcgcatatctgcagggcaagagcgaggaagaacctcctaacttccagcctcctgccaagtgccacgtggtcaccaagagcagagatttcgccgagtggcccatcatgaaggcctctgaagccatccagcggtacatctacgccctgagcacaacagaaagagccgcctgcaagcctggcaagagcagcgaatctcacgccgcttggtttgccgctaccggcgtgtccaatcacggctactctcatgtgcagggcctgaacctgatcttcgatcacaccctgggcagatacgacggcgtgctgaaaaaggtgcagctgcggaacgagaaggccagagccagactggaatccatcaacgccagcagagccgatgagggcctgcctgagattaaggccgaagaggaagaggtggccacaaacgaaaccggccatctgctgcagccacctggcatcaaccctagcttctacgtgtaccagacaatcagccctcaggcctacagacccagggacgagattgtgctgcctcctgagtatgccggctacgtgcgggatcccaacgctcctattcctctgggcgtcgtgcggaacagatgcgacatccagaaaggctgccccggctacattcccgagtggcagagagaagccggcaccgccatttctccaaagacaggcaaagccgtgaccgtgcctggcctgtctcctaagaaaaacaagcggatgcggcggtactggcggagcgagaaagaaaaagcccaggacgccctgctggtcacagtgcggattggcacagattgggtcgtgatcgatgtgcgcggcctgctgagaaatgccagatggcggacaatcgcccctaaggacatcagcctgaacgcactgctggacctgttcaccggcgatcctgtgattgacgtgcggcggaacatcgtgaccttcacctacacactggacgcctgcggcacctacgccagaaagtggacactgaagggcaagcagaccaaggccactctggacaagctgaccgccacacagacagtggccctggtggctattgatctgggccagacaaaccctatcagcgccggcatcagcagagtgacccaagaaaatggcgccctgcagtgcgagcccctggacagattcacactgcccgacgacctgctgaaggacatctccgcctatagaatcgcctgggaccgcaatgaagaggaactgagagccagaagcgtggaagccctgcctgaagcacagcaggctgaagtgcgagcactggacggggtgtccaaagagacagccagaactcagctgtgcgccgactttggactggaccccaaaagactgccctgggacaagatgagcagcaacaccaccttcatcagcgaggccctgctgagcaatagcgtgtccagagatcaggtgttcttcacccctgctccaaagaagggcgccaagaagaaagcccctgtcgaagtgatgcggaaggaccggacatgggccagagcttacaagcccagactgtccgtggaagctcagaagctgaagaacgaagccctgtgggccctgaagagaacaagccccgagtacctgaagctgagccggcggaaagaagaactctgccggcggagcatcaactacgtgatcgagaaaacccggcggagaacccagtgccagatcgtgattcctgtgatcgaggacctgaacgtgcggttctttcacggcagcggcaagagactgcccggctgggataatttcttcaccgccaaaaaagaaaaccggtggttcatccagggcctgcacaaggccttcagcgacctgagaacccaccggtccttttacgtgttcgaagtgcggcccgagcggaccagcatcacctgtcctaaatgcggccactgcgaagtgggcaacagagatggcgaggccttccagtgtctgagctgtggcaagacctgcaacgccgacctggatgtggccactcacaatctgacacaggtggccctgaccggcaagaccatgcctaagagagaggaacctagggacgcccagggtacagcccctgccagaaagacaaagaaagccagcaagagcaaggcccctcctgccgagagagaagatcagaccccagctcaagagcccagccagacatct

SEQ ID NO: 1406 - DNA, 2298 bp, synthetic construct
  source 1..2298: mol_type = other DNA
atggaaaaagagatcaccgagctgaccaagatccgcagagagttccccaacaagaagttcagcagcaccgacatgaagaaggccggcaagctgctgaaggccgaaggacctgatgccgtgcgggacttcctgaacagctgccaagagatcatcggcgacttcaagcctccagtcaagaccaacatcgtgtccatcagcagacccttcgaggaatggcccgtgtccatggttggacgggccatccaagagtactacttcagcctgaccaaagaggaactggaaagcgttcaccccggcaccagcagcgaggaccacaagagctttttcaacatcaccggcctgagcaactacaactacaccagcgtgcagggcctgaacctgatcttcaagaacgccaaggccatctacgacggcaccctggtcaaggccaacaacaagaacaagaagctcgagaagaagtttaacgagatcaaccacaagcggagcctggaaggcctgcctatcatcacccctgatttcgaggaacccttcgacgagaacggccacctgaacaaccctccaggcatcaaccggaacatctacggctatcagggctgcgccgccaaggtgttcgtgccttctaagcacaagatggtgtccctgcctaaagagtacgagggctacaacagggaccccaacctgtctctggccggcttcagaaacagactggaaatccctgagggcgagcctggccatgtgccatggttccagagaatggatatccccgagggccagatcggacacgtgaacaagatccagcggttcaacttcgtgcacggcaagaacagcggcaaagtgaagttctccgacaagaccggcagagtgaagagataccaccacagcaagtacaaggacgctaccaagccttacaagttcctggaagagtccaagaaggtgtcagccctggacagcatcctggccatcatcacaatcggcgacgactgggtcgtgttcgacatcagaggcctgtaccggaacgtgttctacagagagctggcccagaaaggcctgacagctgtgcaactgctggacctgtttaccggcgatcccgtgatcgaccccaagaaaggcgtggtcaccttcagctacaaagagggcgtcgtccccgtctttagccagaaaatcgtgccccggttcaagagccgggacaccctggaaaagctgacctctcagggacctgtggctctgctgtctgtggacctgggacagaatgaacctgtggccgccagagtgtgcagcctgaagaacatcaacgacaagatcaccctggacaactcttgccggatcagcttcctggacgactacaagaagcagatcaaggactacagagacagcctggacgagctggaaatcaagatccggctggaagccatcaactccctcgagacaaaccagcaggtcgagatcagagatctggacgtgttcagcgccgaccgggccaaagccaataccgtggacatgtttgacatcgaccctaacctgatcagctgggactccatgagcgacgccagagtcagcacccagatcagcgacctgtacctgaagaatggcggcgacgagagccgggtgtactttgagattaacaacaaacggattaagcggagcgactacaacatcagccagctcgtgcggcccaagctgagcgatagcaccagaaagaacctgaacgacagcatctggaagctgaagcggaccagcgaggaatacctgaagctgagcaagcggaagctggaactgagcagagccgtcgtgaattacaccatccggcagagcaaactgctgagcggcatcaatgacatcgtgatcattctcgaggacctggacgtgaagaagaaattcaacggcagaggcatccgcgatatcggctgggacaacttcttcagctcccggaaagaaaaccggtggttcatccccgccttccacaaggcctttagcgagctgagcagcaacaggggcctgtgcgtgatcgaagtgaatcctgcctggaccagcgccacctgtcctgattgtggcttctgcagcaaagaaaacagagatggcatcaacttcacgtgccggaagtgcggcgtgtcctaccacgccgatattgacgtggccacactgaatattgccagagtggccgtgctgggcaagcctatgtctggacctgccgacagagagagactgggcgacaccaagaaacctagagtggcccgcagcagaaagaccatgaagcggaaggacatcagcaacagcaccgtcgaggccatggttacagct

SEQ ID NO: 1407 - DNA, 2316 bp, synthetic construct
  source 1..2316: mol_type = other DNA
atgagcaacaccgccgtgtccaccagagaacacatgtccaacaagacaacccctccatctcctctgagcctgctgctgagagcccactttcctggcctgaagttcgagagccaggactacaagatcgccggcaagaaactgagagatggcggacctgaggccgtgatcagctacctgactggaaaaggccaggccaagctgaaggacgtgaagcctcctgccaaggcctttgtgatcgcccagagcagacccttcatcgagtgggacctcgtcagagtgtcccggcagatccaagagaagatctttggcatccccgccaccaagggcagacctaagcaagatggcctgagcgagacagccttcaacgaagccgtggccagcctggaagtggacggcaagagcaagctgaacgaggaaaccagagccgccttctacgaggtgctgggacttgatgccccaagcctgcatgctcaggcccagaatgccctgatcaagagcgccatcagcatcagagaaggcgtgctgaagaaggtggaaaaccggaacgagaagaacctgagcaagaccaagcggcggaaagaggctggcgaagaggccacctttgtggaagagaaggcccacgacgagcggggctatctgattcatcctcctggcgtgaaccagacaatccccggctatcaggccgtggtcatcaagagctgccccagcgatttcatcggcctgcctagtggctgtctggccaaagagtctgccgaggctctgaccgattacctgcctcacgaccggatgactatccccaagggacagcctggctatgtgcccgaatggcagcaccctctgctgaacagaagaaagaaccggcgcagaagagactggtacagcgccagcctgaacaagcccaaggccacctgtagcaagagatccggcacacccaaccggaagaacagcagaaccgaccagatccagagcggcagattcaagggcgccattcctgtgctgatgcggttccaggatgagtgggtcatcatcgacatccggggcctgctgagaaacgcccggtatcggaagctgctgaaagagaagtccaccattcctgacctgctgagcctgttcaccggcgatcccagcatcgatatgagacagggcgtgtgcaccttcatctacaaggccggccaggcctgtagcgccaagatggtcaagacaaagaacgcccctgagatcctgtccgagctgaccaagtctggacctgtggtgctggtgtccatcgacctgggccagacaaatcctatcgccgccaaggtgtccagagtgacccagctgtctgatggccagctgagccacgagacactgctgagggaactgctgagcaacgatagcagcgacggcaaagagatcgcccggtacagagtggccagcgacagactgagagacaagctggccaatctggccgtggaaagactgagccctgagcacaagagcgagatcctgagagccaagaacgacacccctgctctgtgcaaggccagagtgtgtgctgccctgggactgaaccctgaaatgatcgcctgggacaagatgaccccttacaccgagtttctggccaccgcctacctggaaaaaggcggcgacagaaaagtggccacactgaagcccaagaacagacccgagatgctgcggcgggacatcaagttcaagggaaccgagggcgtcagaatcgaggtgtcacctgaagccgccgaggcctatagagaagcccagtgggatctgcagaggacaagccccgagtacctgagactgtccacctggaagcaagagctgacaaagagaatcctgaaccagctgcggcacaaggccgccaaaagcagccagtgtgaagtggtggtcatggccttcgaggacctgaacatcaagatgatgcacggcaacggcaagtgggccgatggtggatgggatgccttcttcatcaagaaacgcgagaaccggtggttcatgcaggccttccacaagagcctgacagagctgggagcacacaagggcgtgccaaccatcgaagtgacccctcacagaaccagcatcacctgtaccaagtgcggccactgcgacaaggccaacagagatggggagagattcgcctgccagaaatgcggctttgtggcccacgccgatctggaaatcgccaccgacaacatcgagagagtggccctgacaggcaagcccatgcctaagcctgagagcgagagaagcggcgacgccaagaaatctgtgggagccagaaaggccgccttcaagcctgaggaagatgccgaagctgccgag

SEQ ID NO: 1408 - DNA, 2151 bp, synthetic construct
  source 1..2151: mol_type = other DNA
atgatcaagcctaccgtcagccagtttctgacccctggcttcaagctgatccggaaccactctagaacagccggcctgaagctgaagaacgagggcgaagaggcctgcaagaaattcgtgcgcgagaacgagatccccaaggacgagtgccccaactttcaaggcggacccgccattgccaacatcattgccaagagccgcgagttcaccgagtgggagatctaccagtctagcctggccatccaagaagtgatcttcaccctgcctaaggacaagctgcccgagcctatcctgaaagaggaatggcgagcccagtggctgtctgagcacggactggataccgtgccttacaaagaagccgccggactgaacctgatcatcaagaacgccgtgaacacctacaagggcgtgcaagtgaaggtggacaacaagaacaaaaacaacctggccaagatcaaccggaagaatgagatcgccaagctgaacggcgagcaagagatcagcttcgaggaaatcaaggccttcgacgacaagggctacctgctgcagaagccctctccaaacaagagcatctactgctaccagagcgtgtcccctaagcctttcatcaccagcaagtaccacaacgtgaacctgcctgaagagtacatcggctactaccggaagtccaacgagcccatcgtgtccccataccagttcgacagactgcggatccctatcggcgagcctggctatgtgcctaagtggcagtacaccttcctgagcaagaaagagaacaagcggcggaagctgagcaagcggatcaagaatgtgtccccaatcctgggcatcatctgcatcaagaaagattggtgcgtgttcgacatgcggggcctgctgagaacaaaccactggaagaagtatcacaagcccaccgacagcatcaacgacctgttcgactacttcaccggcgatcccgtgatcgacaccaaggccaatgtcgtgcggttccggtacaagatggaaaacggcatcgtgaactacaagcccgtgcgggaaaagaagggcaaagagctgctggaaaacatctgcgaccagaacggcagctgcaagctggccacagtggatgtgggccagaacaaccctgtggccatcggcctgttcgagctgaaaaaagtgaacggggagctgaccaagacactgatcagcagacaccccacacctatcgatttctgcaacaagatcaccgcctaccgcgagagatacgacaagctggaaagcagcatcaagctggacgccatcaagcagctgaccagcgagcagaaaatcgaagtggacaactacaacaacaacttcacgccccagaacaccaagcagatcgtgtgcagcaagctgaatatcaaccccaacgatctgccctgggacaagatgatcagcggcacccacttcatcagcgagaaggcccaggtgtccaacaagagcgagatctactttaccagcaccgataagggcaagaccaaggacgtgatgaagtccgactacaagtggttccaggactataagcccaagctgtccaaagaagtgcgggacgccctgagcgatattgagtggcggctgagaagagagagcctggaattcaacaagctcagcaagagcagagagcaggacgccagacagctggccaattggatcagcagcatgtgcgacgtgatcggcatcgagaacctggtcaagaagaacaacttcttcggcggcagcggcaagagagaacccggctgggacaacttctacaagccgaagaaagaaaaccggtggtggatcaacgccatccacaaggccctgacagagctgtcccagaacaagggaaagagagtgatcctgctgcctgccatgcggaccagcatcacctgtcctaagtgcaagtactgcgacagcaagaaccgcaacggcgagaagttcaattgcctgaagtgtggcattgagctgaacgccgacatcgacgtggccaccgaaaatctggctaccgtggccatcacagcccagagcatgcctaagccaacctgcgagagaagcggcgacgccaagaaacctgtgcgggccagaaaagccaaggctcccgagttccacgataagctggcccctagctacaccgtggtgctgagagaagctgtg

SEQ ID NO: 1409 - DNA, 2298 bp, synthetic construct
  source 1..2298: mol_type = other DNA
atgtacagcctggaaatggccgacctgaagtccgagccttctctgctggctaagctgctgagagacagattccccggcaagtactggctgcctaagtactggaagctggccgagaagaagagactgacaggcggagaagaagccgcctgcgagtacatggctgacaagcagctggatagccctccacctaacttccggcctccagccagatgtgtgatcctggccaagagcagacccttcgaggattggccagtgcacagagtggccagcaaggcccagtcttttgtgatcggcctgagcgagcagggcttcgctgctcttagagctgcccctcctagcacagccgacgccagaagagattggctgagaagccatggcgccagcgaggatgatctgatggctctggaagcccagctgctggaaaccatcatgggcaacgccatttctctgcacggcggcgtgctgaagaagatcgacaacgccaacgtgaaggccgccaagagactgtccggaagaaacgaggccagactgaacaagggcctgcaagagctgcctcctgagcaagagggatctgcctatggcgccgatggcctgctggttaatcctcctggcctgaacctgaacatctactgcagaaagagctgctgccccaagcctgtgaagaacaccgccagattcgtgggacactaccccggctacctgagagactccgacagcatcctgatcagcggcaccatggaccggctgacaatcatcgagggaatgcccggacacatccccgcctggcaacgagaacagggacttgtgaaacctggcggcagaaggcggagactgtctggcagcgagagcaacatgagacagaaggtggaccccagcacaggccccagaagaagcacaagatccggcaccgtgaacagaagcaaccagcggacaggcagaaacggcgatcctctgctggtggaaatccggatgaaggaagattgggtcctgctggacgccagaggcctgctgagaaatctgagatggcgcgagtccaagagaggcctgagctgcgatcacgaggatctgagcctgtctggactgctggccctgttttctggcgaccccgtgatcgatcctgtgcggaatgaggtggtgttcctgtacggcgagggcatcattccagtgcggagcacaaagcctgtgggcaccagacagagcaagaaactgctggaacggcaggccagcatgggccctctgacactgatctcttgtgacctgggccagaccaacctgattgccggcagagcctctgctatcagcctgacacatggatctctgggcgtcagatccagcgtgcggattgagctggaccccgagatcatcaagagcttcgagcggctgagaaaggacgccgacagactggaaaccgagatcctgaccgccgccaaagaaaccctgagcgacgaacagaggggcgaagtgaacagccacgagaaggatagcccacagacagccaaggccagcctgtgtagagagctgggactgcaccctccatctctgccttggggacagatgggccctagcaccacctttatcgccgacatgctgatctcccacggcagggacgatgatgcctttctgagccacggcgagttccccacactggaaaagcggaagaagttcgataagcggttctgcctggaaagcagacccctgctgagcagcgagacaagaaaggccctgaacgagtccctgtgggaagtgaagagaaccagcagcgagtacgcccggctgagccagagaaagaaagagatggctagacgggccgtgaacttcgtggtcgagatctccagaagaaagaccggcctgtccaacgtgatcgtgaacatcgaggacctgaacgtgcggatctttcacggcggaggaaaacaggctcctggctgggatggcttcttcagacccaagtccgagaaccggtggttcatccaggccatccacaaggccttcagcgatctggccgctcaccacggaatccctgtgatcgagagcgaccctcagcggaccagcatgacctgtcctgagtgtggccactgcgacagcaagaaccggaatggcgttcggttcctgtgcaaaggctgtggcgcctccatggacgccgattttgatgccgcctgccggaacctggaaagagtggctctgacaggcaagcccatgcctaagcctagcacctcctgtgaaagactgctgagcgccaccaccggcaaagtgtgctctgatcactccctgtctcacgacgccatcgagaaggcttcttaa

SEQ ID NO: 1410 - DNA, 2301 bp, synthetic construct
  source 1..2301: mol_type = other DNA
atggaaaaagagatcaccgagctgaccaagatccgcagagagttccccaacaagaagttcagcagcaccgacatgaagaaggccggcaagctgctgaaggccgaaggacctgatgccgtgcgggacttcctgaacagctgccaagagatcatcggcgacttcaagcctccagtcaagaccaacatcgtgtccatcagcagacccttcgaggaatggcccgtgtccatggttggacgggccatccaagagtactacttcagcctgaccaaagaggaactggaaagcgttcaccccggcaccagcagcgaggaccacaagagctttttcaacatcaccggcctgagcaactacaactacaccagcgtgcagggcctgaacctgatcttcaagaacgccaaggccatctacgacggcaccctggtcaaggccaacaacaagaacaagaagctcgagaagaagtttaacgagatcaaccacaagcggagcctggaaggcctgcctatcatcacccctgatttcgaggaacccttcgacgagaacggccacctgaacaaccctccaggcatcaaccggaacatctacggctatcagggctgcgccgccaaggtgttcgtgccttctaagcacaagatggtgtccctgcctaaagagtacgagggctacaacagggaccccaacctgtctctggccggcttcagaaacagactggaaatccctgagggcgagcctggccatgtgccatggttccagagaatggatatccccgagggccagatcggacacgtgaacaagatccagcggttcaacttcgtgcacggcaagaacagcggcaaagtgaagttctccgacaagaccggcagagtgaagagataccaccacagcaagtacaaggacgctaccaagccttacaagttcctggaagagtccaagaaggtgtcagccctggacagcatcctggccatcatcacaatcggcgacgactgggtcgtgttcgacatcagaggcctgtaccggaacgtgttctacagagagctggcccagaaaggcctgacagctgtgcaactgctggacctgtttaccggcgatcccgtgatcgaccccaagaaaggcgtggtcaccttcagctacaaagagggcgtcgtccccgtctttagccagaaaatcgtgccccggttcaagagccgggacaccctggaaaagctgacctctcagggacctgtggctctgctgtctgtggacctgggacagaatgaacctgtggccgccagagtgtgcagcctgaagaacatcaacgacaagatcaccctggacaactcttgccggatcagcttcctggacgactacaagaagcagatcaaggactacagagacagcctggacgagctggaaatcaagatccggctggaagccatcaactccctcgagacaaaccagcaggtcgagatcagagatctggacgtgttcagcgccgaccgggccaaagccaataccgtggacatgtttgacatcgaccctaacctgatcagctgggactccatgagcgacgccagagtcagcacccagatcagcgacctgtacctgaagaatggcggcgacgagagccgggtgtactttgagattaacaacaaacggattaagcggagcgactacaacatcagccagctcgtgcggcccaagctgagcgatagcaccagaaagaacctgaacgacagcatctggaagctgaagcggaccagcgaggaatacctgaagctgagcaagcggaagctggaactgagcagagccgtcgtgaattacaccatccggcagagcaaactgctgagcggcatcaatgacatcgtgatcattctcgaggacctggacgtgaagaagaaattcaacggcagaggcatccgcgatatcggctgggacaacttcttcagctcccggaaagaaaaccggtggttcatccccgccttccacaagacctttagcgagctgagcagcaacaggggcctgtgcgtgatcgaagtgaatcctgcctggaccagcgccacctgtcctgattgtggcttctgcagcaaagaaaacagagatggcatcaacttcacgtgccggaagtgcggcgtgtcctaccacgccgatattgacgtggccacactgaatattgccagagtggccgtgctgggcaagcctatgtctggacctgccgacagagagagactgggcgacaccaagaaacctagagtggcccgcagcagaaagaccatgaagcggaaggacatcagcaacagcaccgtcgaggccatggttacagcttaa

SEQ ID NO: 1411 - DNA, 30 bp, synthetic construct; identical to SEQ ID NO: 108
  source 1..30: mol_type = other DNA

SEQ ID NO: 1412 - DNA, 2195 bp, synthetic construct
  source 1..2195: mol_type = other DNA
gtgtagataactacgatacgggagggcttaccatctggccccagtgctgcaatgataccgcgagacccacgctcaccggctccagatttatcagcaataaaccagccagccggaagggccgagcgcagaagtggtcctgcaactttatccgcctccatccagtctattaattgttgccgggaagctagagtaagtagttcgccagttaatagtttgcgcaacgttgttgccattgctacaggcatcgtggtgtcacgctcgtcgtttggtatggcttcattcagctccggttcccaacgatcaaggcgagttacatgatcccccatgttgtgcaaaaaagcggttagctccttcggtcctccgatcgttgtcagaagtaagttggccgcagtgttatcactcatggttatggcagcactgcataattctcttactgtcatgccatccgtaagatgcttttctgtgactggtgagtactcaaccaagtcattctgagaatagtgtatgcggcgaccgagttgctcttgcccggcgtcaatacgggataataccgcgccacatagcagaactttaaaagtgctcatcattggaaaacgttcttcggggcgaaaactctcaaggatcttaccgctgttgagatccagttcgatgtaacccactcgtgcacccaactgatcttcagcatcttttactttcaccagcgtttctgggtgagcaaaaacaggaaggcaaaatgccgcaaaaaagggaataagggcgacacggaaatgttgaatactcatactcttcctttttcaatattattgaagcatttatcagggttattgtctcatgagcggatacatatttgaatgtatttagaaaaataaacaaataggggttccgcgcacatttccccgaaaagtgccacctgacgtctaagaaaccattattatcatgacattaacctataaaaataggcgtatcacgaggccctttcgtctcgcgcgtttcggtgatgacggtgaaaacctctgacacatgcagctcccggagacggtcacagcttgtctgccatggacatgtttatattaaatactcgtattgctgttcgattatgaccgaattccctgtcgtgccagctgcattaatgaatcggccaacgcgcggggagaggcggtttgcgtattgggcgctcttccgcttcctcgctcactgactcgctgcgctcggtcgttcggctgcggcgagcggtatcagctcactcaaaggcggtaatacggttatccacagaatcaggggataacgcaggaaagaacatgtgagcaaaaggccagcaaaaggccaggaaccgtaaaaaggccgcgttgctggcgtttttccataggctccgcccccctgacgagcatcacaaaaatcgacgctcaagtcagaggtggcgaaacccgacaggactataaagataccaggcgtttccccctggaagctccctcgtgcgctctcctgttccgaccctgccgcttaccggatacctgtccgcctttctcccttcgggaagcgtggcgctttctcatagctcacgctgtaggtatctcagttcggtgtaggtcgttcgctccaagctgggctgtgtgcacgaaccccccgttcagcccgaccgctgcgccttatccggtaactatcgtcttgagtccaacccggtaagacacgacttatcgccactggcagcagccactggtaacaggattagcagagcgaggtatgtaggcggtgctacagagttcttgaagtggtggcctaactacggctacactagaagaacagtatttggtatctgcgctctgctgaagccagttaccttcggaaaaagagttggtagctcttgatccggcaaacaaaccaccgctggtagcggtggtttttttgtttgcaagcagcagattacgcgcagaaaaaaaggatctcaagaagatcctttgatcttttctacggggtctgacgctcagtggaacgaaaactcacgttaagggattttggtcatgagattatcaaaaaggatcttcacctagatccttttaaattaaaaatgaagttttaaatcaatctaaagtatatatgagtaaacttggtctgacagttaccaatgcttaatcagtgaggcacctatctcagcgatctgtctatttcgttcatccatagttgcctgactccccgtc

SEQ ID NO: 1413 - DNA, 45 bp, synthetic construct
  source 1..45: mol_type = other DNA
acgcgttttagaagagcagcttgttaaggccaaagaacagattga

SEQ ID NO: 1414 - DNA, 44 bp, synthetic construct
  source 1..44: mol_type = other DNA
aaagatttgtccttggagaacggtgctcatgcttacaaccggga

SEQ ID NO: 1415 - DNA, 30 bp, synthetic construct
  source 1..30: mol_type = other DNA
ttgcccaggatgttgccatcctccttgaaa

SEQ ID NO: 1416 - DNA, 20 bp, synthetic construct
  source 1..20: mol_type = other DNA
ttaaggccaaagaacagatt

SEQ ID NO: 1417 - DNA, 20 bp, synthetic construct
  source 1..20: mol_type = other DNA
cgtgatggtctcgattgagt

SEQ ID NO: 1418 - DNA, 20 bp, synthetic construct
  source 1..20: mol_type = other DNA
aagaagtcgtgctgcttcat

SEQ ID NO: 1419 - DNA, 20 bp, synthetic construct
  source 1..20: mol_type = other DNA
atctgcaccaccggcaagct

SEQ ID NO: 1420 - DNA, 20 bp, synthetic construct
  source 1..20: mol_type = other DNA
tggcggatcttgaagttcac

SEQ ID NO: 1421 - DNA, 20 bp, synthetic construct
  source 1..20: mol_type = other DNA
ccgtaggtggcatcgccctc

SEQ ID NO: 1422 - DNA, 20 bp, synthetic construct
  source 1..20: mol_type = other DNA
acgtcgccgtccagctcgac

SEQ ID NO: 1423 - DNA, 20 bp, synthetic construct
  source 1..20: mol_type = other DNA
aagaagatggtgcgctcctg

SEQ ID NO: 1424 - DNA, 20 bp, synthetic construct
  source 1..20: mol_type = other DNA
gaagagcagcttgttaaggc

SEQ ID NO: 1425 - DNA, 20 bp, synthetic construct
  source 1..20: mol_type = other DNA
gccttaacaagctgctcttc

SEQ ID NO: 1426 - DNA, 20 bp, synthetic construct
  source 1..20: mol_type = other DNA
attgatcaggggccagctat

SEQ ID NO: 1427 - DNA, 20 bp, synthetic construct
  source 1..20: mol_type = other DNA
acgcgtactcttcctatagc

SEQ ID NO: 1428 - DNA, 20 bp, synthetic construct
  source 1..20: mol_type = other DNA
cgtgatggtctcgattgagt

SEQ ID NO: 1429 - RNA, 20 nt, synthetic construct
  source 1..20: mol_type = other RNA
gggccgagatgtctcgctcc

SEQ ID NO: 1430 - RNA, 56 nt, synthetic construct
  source 1..56: mol_type = other RNA
ctttcaagactaatagattgctccttacgaggagacgggccgagatgtctcgctcc

SEQ ID NO: 1431 - RNA, 20 nt, synthetic construct
  source 1..20: mol_type = other RNA
ggccgagatgtctcgctccg

SEQ ID NO: 1432 - RNA, 54 nt, synthetic construct
  source 1..54: mol_type = other RNA
ctttcaagactaatagattgctccttacgaggagacgagtctctcagctggtac

SEQ ID NO: 1433 - RNA, 20 nt, synthetic construct
  source 1..20: mol_type = other RNA
  modified_base 20: mod_base = OTHER; note = 2-Prime-OMe nucleotide
attgctccttacgaggagac

SEQ ID NO: 1434 - RNA, 20 nt, synthetic construct
  source 1..20: mol_type = other RNA
  modified_base 19..20: mod_base = OTHER; note = 2-Prime-OMe nucleotides
cagtgggggtgaattcagtg

SEQ ID NO: 1435 - RNA, 40 nt, synthetic construct
  source 1..40: mol_type = other RNA
  modified_base 38..40: mod_base = OTHER; note = 2-Prime-OMe nucleotides
attgctccttacgaggagaccagtgggggtgaattcagtg

SEQ ID NO: 1436 - RNA, 20 nt, synthetic construct
  source 1..20: mol_type = other RNA
  modified_base 19..20: mod_base = OTHER; note = 2-Prime-OMe nucleotides
gagtctctcagctggtacac

SEQ ID NO: 1437 - RNA, 40 nt, synthetic construct
  source 1..40: mol_type = other RNA
  modified_base 38..40: mod_base = OTHER; note = 2-Prime-OMe nucleotides
attgctccttacgaggagacgagtctctcagctggtacac

SEQ ID NO: 1438 - RNA, 17 nt, synthetic construct
  source 1..17: mol_type = other RNA
  modified_base 16..17: mod_base = OTHER; note = 2-Prime-OMe nucleotides
cagtgggggtgaattca

SEQ ID NO: 1439 - RNA, 37 nt, synthetic construct
  source 1..37: mol_type = other RNA
  modified_base 35..37: mod_base = OTHER; note = 2-Prime-OMe nucleotides
attgctccttacgaggagaccagtgggggtgaattca

SEQ ID NO: 1440 - RNA, 17 nt, synthetic construct
  source 1..17: mol_type = other RNA
  modified_base 16..17: mod_base = OTHER; note = 2-Prime-OMe nucleotides
cagtgggggtgaattca

SEQ ID NO: 1441 - RNA, 37 nt, synthetic construct
  source 1..37: mol_type = other RNA
  modified_base 35..37: mod_base = OTHER; note = 2-Prime-OMe nucleotides
attgctccttacgaggagacgagtctctcagctggta

SEQ ID NO: 1442 - RNA, 56 nt, synthetic construct
  source 1..56: mol_type = other RNA
  modified_base order(1..3,54..56): mod_base = OTHER; note = 2-Prime-OMe nucleotides
  modified_base 1^2: mod_base = OTHER; note = Phosphorothioate bond
  modified_base 2^3: mod_base = OTHER; note = Phosphorothioate bond
  modified_base 55^56: mod_base = OTHER; note = Phosphorothioate bond
ctttcaagactaatagattgctccttacgaggagacaggaatacatggtacacgtt

SEQ ID NO: 1443 - RNA, 45 nt, synthetic construct
  source 1..45: mol_type = other RNA
  modified_base order(1..3,43..45): mod_base = OTHER; note = 2-Prime-OMe nucleotides
  modified_base 1^2: mod_base = OTHER; note = Phosphorothioate bond
  modified_base 2^3: mod_base = OTHER; note = Phosphorothioate bond
  modified_base 44^45: mod_base = OTHER; note = Phosphorothioate bond
aatagattgctccttacgaggagacaggaatacatggtacacgtt

SEQ ID NO: 1444 - RNA, 45 nt, synthetic construct; identical to SEQ ID NO: 1443
  source 1..45: mol_type = other RNA
  modified_base order(1,2,44,45): mod_base = OTHER; note = 2-Prime-O-Methoxy-ethyl nucleotides
  modified_base 44..45: mod_base = OTHER; note = Thymine
  modified_base 1^2: mod_base = OTHER; note = Phosphorothioate bond
  modified_base 44^45: mod_base = OTHER; note = Phosphorothioate bond

SEQ ID NO: 1445 - RNA, 56 nt, synthetic construct; identical to SEQ ID NO: 1442
  source 1..56: mol_type = other RNA
  modified_base order(1,56): mod_base = OTHER; note = 2-Prime-Fluoro nucleotides

SEQ ID NO: 1446 - RNA, 45 nt, synthetic construct; identical to SEQ ID NO: 1443
  source 1..45: mol_type = other RNA
  modified_base order(1,45): mod_base = OTHER; note = 2-Prime-Fluoro nucleotides

SEQ ID NO: 1447 - RNA, 56 nt, synthetic construct; identical to SEQ ID NO: 1442
  source 1..56: mol_type = other RNA
  modified_base 1: mod_base = OTHER; note = 2-Prime-OMe nucleotide
  modified_base 53..56: mod_base = OTHER; note = 2-Prime-Fluoro nucleotides
  modified_base 1^2: mod_base = OTHER; note = Phosphorothioate bond

SEQ ID NO: 1448 - RNA, 45 nt, synthetic construct; identical to SEQ ID NO: 1443
  source 1..45: mol_type = other RNA
  modified_base 1: mod_base = OTHER; note = 2-Prime-OMe nucleotide
  modified_base 42..45: mod_base = OTHER; note = 2-Prime-Fluoro nucleotides
  modified_base 1^2: mod_base = OTHER; note = Phosphorothioate bond

SEQ ID NO: 1449 - RNA, 56 nt, synthetic construct; identical to SEQ ID NO: 1442
  source 1..56: mol_type = other RNA
  modified_base 53..56: mod_base = OTHER; note = 2-Prime-Fluoro nucleotides

SEQ ID NO: 1450 - RNA, 45 nt, synthetic construct; identical to SEQ ID NO: 1443
  source 1..45: mol_type = other RNA
  modified_base 42..45: mod_base = OTHER; note = 2-Prime-Fluoro nucleotides

SEQ ID NO: 1451 - RNA, 57 nt, synthetic construct
  source 1..57: mol_type = other RNA
  misc_feature order(1,57): note = C3 Spacer
ctttcaagactaatagattgctccttacgaggagacaggaatacatggtacacgttg

SEQ ID NO: 1452 - RNA, 46 nt, synthetic construct
  source 1..46: mol_type = other RNA
  misc_feature order(1,46): note = C3 Spacer
aatagattgctccttacgaggagacaggaatacatggtacacgttg

SEQ ID NO: 1453 - DNA, 56 bp, synthetic construct; identical to SEQ ID NO: 1327
  source 1..56: mol_type = other DNA
  misc_feature 53..56: note = DNA
  misc_feature 1..52: note = RNA
  modified_base 1..3: mod_base = OTHER; note = 2-Prime-OMe nucleotides

SEQ ID NO: 1454 - DNA, 56 bp, synthetic construct; identical to SEQ ID NO: 1327
  source 1..56: mol_type = other DNA
  misc_feature 53..56: note = DNA
  misc_feature 1..52: note = RNA

SEQ ID NO: 1455 - DNA, 56 bp, synthetic construct; identical to SEQ ID NO: 1327
  source 1..56: mol_type = other DNA
  misc_feature order(37,53..56): note = DNA
  misc_feature order(1..36,38..52): note = RNA

SEQ ID NO: 1456 - DNA, 56 bp, synthetic construct; identical to SEQ ID NO: 1327
  source 1..56: mol_type = other DNA
  misc_feature order(44,53..56): note = DNA
  misc_feature order(1..43,45..52): note = RNA

SEQ ID NO: 1457 - DNA, 56 bp, synthetic construct; identical to SEQ ID NO: 1327
  source 1..56: mol_type = other DNA
  misc_feature order(45,53..56): note = DNA
  misc_feature order(1..44,46..52): note = RNA

SEQ ID NO: 1458 - DNA, 56 bp, synthetic construct; identical to SEQ ID NO: 1327
  source 1..56: mol_type = other DNA
  misc_feature order(37,44,53..56): note = DNA
  misc_feature order(1..36,38..43,45..52): note = RNA

SEQ ID NO: 1459 - DNA, 56 bp, synthetic construct; identical to SEQ ID NO: 1327
  source 1..56: mol_type = other DNA
  misc_feature order(37,45,53..56): note = DNA
  misc_feature order(1..36,38..44,46..52): note = RNA

SEQ ID NO: 1460 - DNA, 56 bp, synthetic construct; identical to SEQ ID NO: 1327
  source 1..56: mol_type = other DNA
  misc_feature order(37,44,45,53..56): note = DNA
  misc_feature order(1..36,38..43,46..52): note = RNA

SEQ ID NO: 1461 - DNA, 45 bp, synthetic construct
  source 1..45: mol_type = other DNA
  misc_feature order(26,33,34,42..45): note = DNA
  misc_feature order(1..25,27..32,35..41): note = RNA
aatagattgctccttacgaggagacaggaatacatggtacacgtt

SEQ ID NO: 1462 - RNA, 52 nt, synthetic construct
  source 1..52: mol_type = other RNA
aatagattgctccttacgaggagacaggaatacatggtacacgttaaaaaaa

SEQ ID NO: 1463 - DNA, 56 bp, synthetic construct; identical to SEQ ID NO: 1327
  source 1..56: mol_type = other DNA
  misc_feature order(1..36,38..43,46..52): note = RNA
  misc_feature order(37,44,45,53..56): note = DNA
  modified_base 1..3: mod_base = OTHER; note = 2-Prime-OMe nucleotides
  modified_base 1^2: mod_base = OTHER; note = Phosphorothioate bond
  modified_base 2^3: mod_base = OTHER; note = Phosphorothioate bond
  modified_base 53^54: mod_base = OTHER; note = Phosphorothioate bond
  modified_base 54^55: mod_base = OTHER; note = Phosphorothioate bond
  modified_base 55^56: mod_base = OTHER; note = Phosphorothioate bond

SEQ ID NO: 1464 - RNA, 45 nt, synthetic construct; identical to SEQ ID NO: 1443
  source 1..45: mol_type = other RNA

SEQ ID NO: 1465 - RNA, 56 nt, synthetic construct; identical to SEQ ID NO: 1442
  source 1..56: mol_type = other RNA

SEQ ID NO: 1466 - RNA, 35 nt, synthetic construct
  source 1..35: mol_type = other RNA
tttcaagactaatagattgctccttacgaggagac

SEQ ID NO: 1467 - RNA, 34 nt, synthetic construct
  source 1..34: mol_type = other RNA
ttcaagactaatagattgctccttacgaggagac

SEQ ID NO: 1468 - RNA, 33 nt, synthetic construct
  source 1..33: mol_type = other RNA
tcaagactaatagattgctccttacgaggagac

SEQ ID NO: 1469 - RNA, 32 nt, synthetic construct
  source 1..32: mol_type = other RNA
caagactaatagattgctccttacgaggagac

SEQ ID NO: 1470 - RNA, 31 nt, synthetic construct
  source 1..31: mol_type = other RNA
aagactaatagattgctccttacgaggagac

SEQ ID NO: 1471 - RNA, 30 nt, synthetic construct
  source 1..30: mol_type = other RNA
agactaatagattgctccttacgaggagac

SEQ ID NO: 1472 - RNA, 29 nt, synthetic construct
  source 1..29: mol_type = other RNA
gactaatagattgctccttacgaggagac

SEQ ID NO: 1473 - RNA, 28 nt, synthetic construct
  source 1..28: mol_type = other RNA
actaatagattgctccttacgaggagac

SEQ ID NO: 1474 - RNA, 27 nt, synthetic construct
  source 1..27: mol_type = other RNA
ctaatagattgctccttacgaggagac

SEQ ID NO: 1475 - RNA, 26 nt, synthetic construct
  source 1..26: mol_type = other RNA
taatagattgctccttacgaggagac

SEQ ID NO: 1476 - RNA, 25 nt, synthetic construct
  source 1..25: mol_type = other RNA
aatagattgctccttacgaggagac

SEQ ID NO: 1477 - RNA, 24 nt, synthetic construct
  source 1..24: mol_type = other RNA
atagattgctccttacgaggagac

SEQ ID NO: 1478 - RNA, 23 nt, synthetic construct
  source 1..23: mol_type = other RNA
tagattgctccttacgaggagac

SEQ ID NO: 1479 - RNA, 22 nt, synthetic construct
  source 1..22: mol_type = other RNA
agattgctccttacgaggagac

SEQ ID NO: 1480 - RNA, 21 nt, synthetic construct
  source 1..21: mol_type = other RNA
gattgctccttacgaggagac

SEQ ID NO: 1481 - RNA, 20 nt, synthetic construct
  source 1..20: mol_type = other RNA
attgctccttacgaggagac

SEQ ID NO: 1482 - RNA, 30 nt, synthetic construct
  source 1..30: mol_type = other RNA
aggaatacatggtacacgttgaagaacatt

SEQ ID NO: 1483 - RNA, 29 nt, synthetic construct
  source 1..29: mol_type = other RNA
aggaatacatggtacacgttgaagaacat

SEQ ID NO: 1484 - RNA, 28 nt, synthetic construct
  source 1..28: mol_type = other RNA
aggaatacatggtacacgttgaagaaca

SEQ ID NO: 1485 - RNA, 27 nt, synthetic construct
  source 1..27: mol_type = other RNA
aggaatacatggtacacgttgaagaac

SEQ ID NO: 1486 - RNA, 26 nt, synthetic construct
  source 1..26: mol_type = other RNA
aggaatacatggtacacgttgaagaa

SEQ ID NO: 1487 - RNA, 25 nt, synthetic construct
  source 1..25: mol_type = other RNA
aggaatacatggtacacgttgaaga

SEQ ID NO: 1488 - RNA, 24 nt, synthetic construct
  source 1..24: mol_type = other RNA
aggaatacatggtacacgttgaag

SEQ ID NO: 1489 - RNA, 23 nt, synthetic construct
  source 1..23: mol_type = other RNA
aggaatacatggtacacgttgaa

SEQ ID NO: 1490 - RNA, 22 nt, synthetic construct
  source 1..22: mol_type = other RNA
aggaatacatggtacacgttga

SEQ ID NO: 1491 - RNA, 21 nt, synthetic construct
  source 1..21: mol_type = other RNA
aggaatacatggtacacgttg

SEQ ID NO: 1492 - RNA, 20 nt, synthetic construct
  source 1..20: mol_type = other RNA
aggaatacatggtacacgtt

SEQ ID NO: 1493 - RNA, 19 nt, synthetic construct
  source 1..19: mol_type = other RNA
aggaatacatggtacacgt

SEQ ID NO: 1494 - RNA, 18 nt, synthetic construct
  source 1..18: mol_type = other RNA
aggaatacatggtacacg

SEQ ID NO: 1495 - RNA, 17 nt, synthetic construct
  source 1..17: mol_type = other RNA
aggaatacatggtacac

SEQ ID NO: 1496 - RNA, 16 nt, synthetic construct
  source 1..16: mol_type = other RNA
aggaatacatggtaca

SEQ ID NO: 1497 - RNA, 15 nt, synthetic construct
  source 1..15: mol_type = other RNA
aggaatacatggtac

SEQ ID NO: 1498 - RNA, 20 nt, synthetic construct
  source 1..20: mol_type = other RNA
aggaatacatggtacacgtt

SEQ ID NO: 1499 - RNA, 66 nt, synthetic construct
  source 1..66: mol_type = other RNA
ctttcaagactaatagattgctccttacgaggagacaggaatacatggtacacgttgaagaacatt

SEQ ID NO: 1500 - RNA, 65 nt, synthetic construct
  source 1..65: mol_type = other RNA
ctttcaagactaatagattgctccttacgaggagacaggaatacatggtacacgttgaagaacat

SEQ ID NO: 1501 - RNA, 64 nt, synthetic construct
  source 1..64: mol_type = other RNA
ctttcaagactaatagattgctccttacgaggagacaggaatacatggtacacgttgaagaaca

SEQ ID NO: 1502 - RNA, 63 nt, synthetic construct
  source 1..63: mol_type = other RNA
ctttcaagactaatagattgctccttacgaggagacaggaatacatggtacacgttgaagaac

SEQ ID NO: 1503 - RNA, 62 nt, synthetic construct
  source 1..62: mol_type = other RNA
ctttcaagactaatagattgctccttacgaggagacaggaatacatggtacacgttgaagaa

SEQ ID NO: 1504 - RNA, 61 nt, synthetic construct
  source 1..61: mol_type = other RNA
ctttcaagactaatagattgctccttacgaggagacaggaatacatggtacacgttgaaga

SEQ ID NO: 1505 - RNA, 60 nt, synthetic construct
  source 1..60: mol_type = other RNA
ctttcaagactaatagattgctccttacgaggagacaggaatacatggtacacgttgaag

SEQ ID NO: 1506 - RNA, 59 nt, synthetic construct
  source 1..59: mol_type = other RNA
ctttcaagactaatagattgctccttacgaggagacaggaatacatggtacacgttgaa

SEQ ID NO: 1507 - RNA, 58 nt, synthetic construct
  source 1..58: mol_type = other RNA
ctttcaagactaatagattgctccttacgaggagacaggaatacatggtacacgttga

SEQ ID NO: 1508 - RNA, 57 nt, synthetic construct; identical to SEQ ID NO: 1451
  source 1..57: mol_type = other RNA

SEQ ID NO: 1509 - RNA, 56 nt, synthetic construct; identical to SEQ ID NO: 1442
  source 1..56: mol_type = other RNA

SEQ ID NO: 1510 - RNA, 55 nt, synthetic construct
  source 1..55: mol_type = other RNA
ctttcaagactaatagattgctccttacgaggagacaggaatacatggtacacgt

SEQ ID NO: 1511 - RNA, 54 nt, synthetic construct
  source 1..54: mol_type = other RNA
ctttcaagactaatagattgctccttacgaggagacaggaatacatggtacacg

SEQ ID NO: 1512 - RNA, 53 nt, synthetic construct
  source 1..53: mol_type = other RNA
ctttcaagactaatagattgctccttacgaggagacaggaatacatggtacac

SEQ ID NO: 1513 - RNA, 52 nt, synthetic construct
  source 1..52: mol_type = other RNA
ctttcaagactaatagattgctccttacgaggagacaggaatacatggtaca

SEQ ID NO: 1514 - RNA, 51 nt, synthetic construct
  source 1..51: mol_type = other RNA
ctttcaagactaatagattgctccttacgaggagacaggaatacatggtac

SEQ ID NO: 1515 - RNA, 55 nt, synthetic construct
  source 1..55: mol_type = other RNA
tttcaagactaatagattgctccttacgaggagacaggaatacatggtacacgtt

SEQ ID NO: 1516 - RNA, 54 nt, synthetic construct
  source 1..54: mol_type = other RNA
ttcaagactaatagattgctccttacgaggagacaggaatacatggtacacgtt

SEQ ID NO: 1517 - RNA, 53 nt, synthetic construct
  source 1..53: mol_type = other RNA
tcaagactaatagattgctccttacgaggagacaggaatacatggtacacgtt

SEQ ID NO: 1518 - RNA, 52 nt, synthetic construct
  source 1..52: mol_type = other RNA
caagactaatagattgctccttacgaggagacaggaatacatggtacacgtt

SEQ ID NO: 1519 - RNA, 51 nt, synthetic construct
  source 1..51: mol_type = other RNA
aagactaatagattgctccttacgaggagacaggaatacatggtacacgtt

SEQ ID NO: 1520 - RNA, 50 nt, synthetic construct
  source 1..50: mol_type = other RNA
agactaatagattgctccttacgaggagacaggaatacatggtacacgtt

SEQ ID NO: 1521 - RNA, 49 nt, synthetic construct
  source 1..49: mol_type = other RNA
gactaatagattgctccttacgaggagacaggaatacatggtacacgtt

SEQ ID NO: 1522 - RNA, 48 nt, synthetic construct
  source 1..48: mol_type = other RNA
actaatagattgctccttacgaggagacaggaatacatggtacacgtt

SEQ ID NO: 1523 - RNA, 47 nt, synthetic construct
  source 1..47: mol_type = other RNA
ctaatagattgctccttacgaggagacaggaatacatggtacacgtt

SEQ ID NO: 1524 - RNA, 46 nt, synthetic construct
  source 1..46: mol_type = other RNA
taatagattgctccttacgaggagacaggaatacatggtacacgtt

SEQ ID NO: 1525 - RNA, 45 nt, synthetic construct; identical to SEQ ID NO: 1443
  source 1..45: mol_type = other RNA

SEQ ID NO: 1526 - RNA, 44 nt, synthetic construct
  source 1..44: mol_type = other RNA
atagattgctccttacgaggagacaggaatacatggtacacgtt

SEQ ID NO: 1527 - RNA, 43 nt, synthetic construct
  source 1..43: mol_type = other RNA
tagattgctccttacgaggagacaggaatacatggtacacgtt

SEQ ID NO: 1528 - RNA, 42 nt, synthetic construct
  source 1..42: mol_type = other RNA
agattgctccttacgaggagacaggaatacatggtacacgtt

SEQ ID NO: 1529 - RNA, 41 nt, synthetic construct
  source 1..41: mol_type = other RNA
gattgctccttacgaggagacaggaatacatggtacacgtt

SEQ ID NO: 1530 - RNA, 40 nt, synthetic construct
  source 1..40: mol_type = other RNA
attgctccttacgaggagacaggaatacatggtacacgtt

SEQ ID NO: 1531 - RNA, 24 nt, synthetic construct
  source 1..24: mol_type = other RNA
atagattgctccttacgaggagac

SEQ ID NO: 1532 - RNA, 56 nt, synthetic construct
  source 1..56: mol_type = other RNA
ctttcaagactaatagattgctccttacgaggagacagcaaggactggtctttcta

SEQ ID NO: 1533 - DNA, 37 bp, synthetic construct
  source 1..37: mol_type = other DNA
attgctccttacgaggagactggatatctgtgggaca

SEQ ID NO: 1534 - DNA, 37 bp, synthetic construct
  source 1..37: mol_type = other DNA
attgctccttacgaggagactcccacagatatccaga

SEQ ID NO: 1535 - DNA, 37 bp, synthetic construct
  source 1..37: mol_type = other DNA
attgctccttacgaggagacgagtctctcagctggta

SEQ ID NO: 1536 - DNA, 37 bp, synthetic construct
  source 1..37: mol_type = other DNA
attgctccttacgaggagacagagtctctcagctggt

SEQ ID NO: 1537 - DNA, 37 bp, synthetic construct
  source 1..37: mol_type = other DNA
attgctccttacgaggagactcactggatttagagtc

SEQ ID NO: 1538 - DNA, 37 bp, synthetic construct
  source 1..37: mol_type = other DNA
attgctccttacgaggagacagaatcaaaatcggtga

SEQ ID NO: 1539 - DNA, 37 bp, synthetic construct
  source 1..37: mol_type = other DNA
attgctccttacgaggagacgagaatcaaaatcggtg

SEQ ID NO: 1540 - DNA, 37 bp, synthetic construct
  source 1..37: mol_type = other DNA
attgctccttacgaggagacaccgattttgattctca

SEQ ID NO: 1541 - DNA, 37 bp, synthetic construct
  source 1..37: mol_type = other DNA
attgctccttacgaggagactttgagaatcaaaatcg

SEQ ID NO: 1542 - DNA, 37 bp, synthetic construct
  source 1..37: mol_type = other DNA
attgctccttacgaggagacgtttgagaatcaaaatc

SEQ ID NO: 1543 - DNA, 37 bp, synthetic construct
  source 1..37: mol_type = other DNA
attgctccttacgaggagactgattctcaaacaaatg

SEQ ID NO: 1544 - DNA, 37 bp, synthetic construct
  source 1..37: mol_type = other DNA
attgctccttacgaggagacgattctcaaacaaatgt

SEQ ID NO: 1545 - DNA, 37 bp, synthetic construct
  source 1..37: mol_type = other DNA
attgctccttacgaggagacattctcaaacaaatgtg

SEQ ID NO: 1546 - DNA, 37 bp, synthetic construct
  source 1..37: mol_type = other DNA
attgctccttacgaggagactgacacatttgtttgag

SEQ ID NO: 1547 - DNA, 37 bp, synthetic construct
  source 1..37: mol_type = other DNA
attgctccttacgaggagactcaaacaaatgtgtcac

SEQ ID NO: 1548 - DNA, 37 bp, synthetic construct
  source 1..37: mol_type = other DNA
attgctccttacgaggagacgtgacacatttgtttga

SEQ ID NO: 1549 - DNA, 37 bp, synthetic construct
  source 1..37: mol_type = other DNA
attgctccttacgaggagacctttgtgacacatttgt

SEQ ID NO: 1550 - DNA, 37 bp, synthetic construct
  source 1..37: mol_type = other DNA
attgctccttacgaggagactgatgtgtatatcacag

SEQ ID NO: 1551 - DNA, 37 bp, synthetic construct
  source 1..37: mol_type = other DNA
attgctccttacgaggagactctgtgatatacacatc

SEQ ID NO: 1552 - DNA, 37 bp, synthetic construct
  source 1..37: mol_type = other DNA
attgctccttacgaggagacgtctgtgatatacacat

SEQ ID NO: 1553 - DNA, 37 bp, synthetic construct
  source 1..37: mol_type = other DNA
attgctccttacgaggagactgtctgtgatatacaca

SEQ ID NO: 1554 - DNA, 37 bp, synthetic construct
  source 1..37: mol_type = other DNA
attgctccttacgaggagacaagtccatagacctcat

SEQ ID NO: 1555 - DNA, 37 bp, synthetic construct
  source 1..37: mol_type = other DNA
attgctccttacgaggagacctcttgaagtccataga

SEQ ID NO: 1556 - DNA, 37 bp, synthetic construct
  source 1..37: mol_type = other DNA
attgctccttacgaggagacaagagcaacagtgctgt

SEQ ID NO: 1557 - DNA, 37 bp, synthetic construct
  source 1..37: mol_type = other DNA
attgctccttacgaggagacctccaggccacagcact

SEQ ID NO: 1558 - DNA, 37 bp, synthetic construct
  source 1..37: mol_type = other DNA
attgctccttacgaggagacttgctccaggccacagc

SEQ ID NO: 1559 - DNA, 37 bp, synthetic construct
  source 1..37: mol_type = other DNA
attgctccttacgaggagacgttgctccaggccacag

SEQ ID NO: 1560 - DNA, 37 bp, synthetic construct
  source 1..37: mol_type = other DNA
attgctccttacgaggagaccacatgcaaagtcagat

SEQ ID NO: 1561 - DNA, 37 bp, synthetic construct
  source 1..37: mol_type = other DNA
attgctccttacgaggagacgcacatgcaaagtcaga

SEQ ID NO: 1562 - DNA, 37 bp, synthetic construct
  source 1..37: mol_type = other DNA
attgctccttacgaggagacgcatgtgcaaacgcctt

SEQ ID NO: 1563 - DNA, 37 bp, synthetic construct
  source 1..37: mol_type = other DNA
attgctccttacgaggagacaaggcgtttgcacatgc

SEQ ID NO: 1564 - DNA, 37 bp, synthetic construct
  source 1..37: mol_type = other DNA
attgctccttacgaggagaccatgtgcaaacgccttc

SEQ ID NO: 1565 - DNA, 37 bp, synthetic construct
  source 1..37: mol_type = other DNA
attgctccttacgaggagacttgaaggcgtttgcaca

SEQ ID NO: 1566 - DNA, 37 bp, synthetic construct
  source 1..37: mol_type = other DNA
attgctccttacgaggagacaacaacagcattattcc

SEQ ID NO: 1567 - DNA, 37 bp, synthetic construct
  source 1..37: mol_type = other DNA
attgctccttacgaggagactggaataatgctgttgt

SEQ ID NO: 1568 - DNA, 37 bp, synthetic construct
  source 1..37: mol_type = other DNA
attgctccttacgaggagacttccagaagacaccttc

SEQ ID NO: 1569 - DNA, 37 bp, synthetic construct
  source 1..37: mol_type = other DNA
attgctccttacgaggagaccagaagacaccttcttc

SEQ ID NO: 1570 - DNA, 37 bp, synthetic construct
  source 1..37: mol_type = other DNA
attgctccttacgaggagaccctgggctggggaagaa

SEQ ID NO: 1571 - DNA, 37 bp, synthetic construct
  source 1..37: mol_type = other DNA
attgctccttacgaggagacttccccagcccaggtaa

SEQ ID NO: 1572 - DNA, 37 bp, synthetic construct
  source 1..37: mol_type = other DNA
attgctccttacgaggagaccccagcccaggtaaggg

SEQ ID NO: 1573 - DNA, 37 bp, synthetic construct
  source 1..37: mol_type = other DNA
attgctccttacgaggagactaaaaggaaaaacagac

SEQ ID NO: 1574 - DNA, 37 bp, synthetic construct
  source 1..37: mol_type = other DNA
attgctccttacgaggagacctaaaaggaaaaacaga

SEQ ID NO: 1575 - DNA, 37 bp, synthetic construct
  source 1..37: mol_type = other DNA
attgctccttacgaggagacttccttttagaaagttc

SEQ ID NO: 1576 - DNA, 37 bp, synthetic construct
  source 1..37: mol_type = other DNA
attgctccttacgaggagactccttttagaaagttcc

SEQ ID NO: 1577 - DNA, 37 bp, synthetic construct
  source 1..37: mol_type = other DNA
attgctccttacgaggagacccttttagaaagttcct

SEQ ID NO: 1578 - DNA, 37 bp, synthetic construct
  source 1..37: mol_type = other DNA
attgctccttacgaggagaccttttagaaagttcctg

SEQ ID NO: 1579 - DNA, 37 bp, synthetic construct
  source 1..37: mol_type = other DNA
attgctccttacgaggagactagaaagttcctgtgat

SEQ ID NO: 1580 - DNA, 37 bp, synthetic construct
  source 1..37: mol_type = other DNA
attgctccttacgaggagacagaaagttcctgtgatg

SEQ ID NO: 1581 - DNA, 37 bp, synthetic construct
  source 1..37: mol_type = other DNA
attgctccttacgaggagacgaaagttcctgtgatgt

SEQ ID NO: 1582 - DNA, 37 bp, synthetic construct
  source 1..37: mol_type = other DNA
attgctccttacgaggagacacatcacaggaactttc

SEQ ID NO: 1583 - DNA, 37 bp, synthetic construct
  source 1..37: mol_type = other DNA
attgctccttacgaggagacctgtgatgtcaagctgg

SEQ ID NO: 1584 - DNA, 37 bp, synthetic construct
  source 1..37: mol_type = other DNA
attgctccttacgaggagactcgaccagcttgacatc

SEQ ID NO: 1585 - DNA, 37 bp, synthetic construct
  source 1..37: mol_type = other DNA
attgctccttacgaggagacctcgaccagcttgacat

SEQ ID NO: 1586 - DNA, 37 bp, synthetic construct
  source 1..37: mol_type = other DNA
attgctccttacgaggagactctcgaccagcttgaca

SEQ ID NO: 1587 - DNA, 37 bp, synthetic construct
  source 1..37: mol_type = other DNA
attgctccttacgaggagacaaagcttttctcgacca

SEQ ID NO: 1588 - DNA, 37 bp, synthetic construct
  source 1..37: mol_type = other DNA
attgctccttacgaggagaccaaagcttttctcgacc

SEQ ID NO: 1589 - DNA, 37 bp, synthetic construct
  source 1..37: mol_type = other DNA
attgctccttacgaggagaccctgtttcaaagctttt

SEQ ID NO: 1590 - DNA, 37 bp, synthetic construct
  source 1..37: mol_type = other DNA
attgctccttacgaggagacgaaacaggtaagacagg

SEQ ID NO: 1591 - DNA, 37 bp, synthetic construct
  source 1..37: mol_type = other DNA
attgctccttacgaggagacaaacaggtaagacaggg

SEQ ID NO: 1592 - DNA, 37 bp, synthetic construct
  source 1..37: mol_type = other DNA
attgctccttacgaggagaccatccatccgacattga

SEQ ID NO: 1593 - DNA, 37 bp, synthetic construct
  source 1..37: mol_type = other DNA
attgctccttacgaggagacatccatccgacattgaa

SEQ ID NO: 1594 - DNA, 37 bp, synthetic construct
  source 1..37: mol_type = other DNA
attgctccttacgaggagacagtaagtcaacttcaat

SEQ ID NO: 1595 - DNA, 37 bp, synthetic construct
  source 1..37: mol_type = other DNA
attgctccttacgaggagacttcagtaagtcaacttc

SEQ ID NO: 1596 - DNA, 37 bp, synthetic construct
  source 1..37: mol_type = other DNA
attgctccttacgaggagacaagttgacttactgaag

SEQ ID NO: 1597 - DNA, 37 bp, synthetic construct
  source 1..37: mol_type = other DNA
attgctccttacgaggagacacttactgaagaatgga

SEQ ID NO: 1598 - DNA, 37 bp, synthetic construct
  source 1..37: mol_type = other DNA
attgctccttacgaggagactctctccattcttcagt

SEQ ID NO: 1599 - DNA, 37 bp, synthetic construct
  source 1..37: mol_type = other DNA
attgctccttacgaggagacctgaagaatggagagag

SEQ ID NO: 1600 - DNA, 37 bp, synthetic construct
  source 1..37: mol_type = other DNA
attgctccttacgaggagacaattctctctccattct

SEQ ID NO: 1601 - DNA, 37 bp, synthetic construct
  source 1..37: mol_type = other DNA
attgctccttacgaggagaccaattctctctccattc

SEQ ID NO: 1602 - DNA, 37 bp, synthetic construct
  source 1..37: mol_type = other DNA
attgctccttacgaggagactcaattctctctccatt

SEQ ID NO: 1603 - DNA, 37 bp, synthetic construct
  source 1..37: mol_type = other DNA
attgctccttacgaggagacttcaattctctctccat

SEQ ID NO: 1604 - DNA, 37 bp, synthetic construct
  source 1..37: mol_type = other DNA
attgctccttacgaggagacaaaaagtggagcattca

SEQ ID NO: 1605 - DNA, 37 bp, synthetic construct
  source 1..37: mol_type = other DNA
attgctccttacgaggagacctgaaagacaagtctga

SEQ ID NO: 1606 - DNA, 37 bp, synthetic construct
  source 1..37: mol_type = other DNA
attgctccttacgaggagacagacttgtctttcagca

SEQ ID NO: 1607 - DNA, 37 bp, synthetic construct
  source 1..37: mol_type = other DNA
attgctccttacgaggagactctttcagcaaggactg

SEQ ID NO: 1608 - DNA, 37 bp, synthetic construct
  source 1..37: mol_type = other DNA
attgctccttacgaggagaccagcaaggactggtctt

SEQ ID NO: 1609 - DNA, 37 bp, synthetic construct
  source 1..37: mol_type = other DNA
attgctccttacgaggagacagcaaggactggtcttt

SEQ ID NO: 1610 - DNA, 37 bp, synthetic construct
  source 1..37: mol_type = other DNA
attgctccttacgaggagacctatctcttgtactaca

SEQ ID NO: 1611 - DNA, 37 bp, synthetic construct
  source 1..37: mol_type = other DNA
attgctccttacgaggagactatctcttgtactacac

SEQ ID NO: 1612 - DNA, 37 bp, synthetic construct
  source 1..37: mol_type = other DNA
attgctccttacgaggagacagtgtagtacaagagat

SEQ ID NO: 1613 - DNA, 37 bp, synthetic construct
  source 1..37: mol_type = other DNA
attgctccttacgaggagactactacactgaattcac

SEQ ID NO: 1614 - DNA, 37 bp, synthetic construct
  source 1..37: mol_type = other DNA
attgctccttacgaggagacagtgggggtgaattcag

SEQ ID NO: 1615 - DNA, 37 bp, synthetic construct
  source 1..37: mol_type = other DNA
attgctccttacgaggagaccagtgggggtgaattca

SEQ ID NO: 1616 - DNA, 37 bp, synthetic construct
  source 1..37: mol_type = other DNA
attgctccttacgaggagactcagtgggggtgaattc

SEQ ID NO: 1617 - DNA, 37 bp, synthetic construct
  source 1..37: mol_type = other DNA
attgctccttacgaggagacttcagtgggggtgaatt

SEQ ID NO: 1618 - DNA, 37 bp, synthetic construct
  source 1..37: mol_type = other DNA
attgctccttacgaggagacacccccactgaaaaaga

SEQ ID NO: 1619 - DNA, 37 bp, synthetic construct
  source 1..37: mol_type = other DNA
attgctccttacgaggagacacacggcaggcatactc

SEQ ID NO: 1620 - DNA, 37 bp, synthetic construct
  source 1..37: mol_type = other DNA
attgctccttacgaggagacggctgtgacaaagtcac

SEQ ID NO: 1621 - DNA, 37 bp, synthetic construct
  source 1..37: mol_type = other DNA
attgctccttacgaggagacgtcacagcccaagatag

SEQ ID NO: 1622 - DNA, 37 bp, synthetic construct
  source 1..37: mol_type = other DNA
attgctccttacgaggagactcacagcccaagatagt

SEQ ID NO: 1623 - DNA, 37 bp, synthetic construct
  source 1..37: mol_type = other DNA
attgctccttacgaggagacactatcttgggctgtga

SEQ ID NO: 1624 - DNA, 37 bp, synthetic construct
  source 1..37: mol_type = other DNA
attgctccttacgaggagacccccacttaactatctt

SEQ ID NO: 1625 - RNA, 37 nt, synthetic construct
  source 1..37: mol_type = other RNA
attgctccttacgaggagacccttccgctcacctccg

SEQ ID NO: 1626 - RNA, 37 nt, synthetic construct; identical to SEQ ID NO: 1625
  source 1..37: mol_type = other RNA

SEQ ID NO: 1627 - RNA, 37 nt, synthetic construct
  source 1..37: mol_type = other RNA
attgctccttacgaggagaccgctcacctccgcctga

SEQ ID NO: 1628 - RNA, 37 nt, synthetic construct
  source 1..37: mol_type = other RNA
attgctccttacgaggagactccactgctcaggcgga

SEQ ID NO: 1629 - RNA, 37 nt, synthetic construct
  source 1..37: mol_type = other RNA
attgctccttacgaggagactagcaccgcccagacga

SEQ ID NO: 1630 - RNA, 37 nt, synthetic construct
  source 1..37: mol_type = other RNA
attgctccttacgaggagacaggcatgcagatcccac

SEQ ID NO: 1631 - RNA, 37 nt, synthetic construct
  source 1..37: mol_type = other RNA
attgctccttacgaggagaccacaggcgccctggcca

SEQ ID NO: 1632 - RNA, 37 nt, synthetic construct
  source 1..37: mol_type = other RNA
attgctccttacgaggagactctgggcggtgctacaa

SEQ ID NO: 1633 - RNA, 37 nt, synthetic construct
  source 1..37: mol_type = other RNA
attgctccttacgaggagacgcatgcctggagcagcc

SEQ ID NO: 1634 - RNA, 37 nt, synthetic construct; identical to SEQ ID NO: 1629
  source 1..37: mol_type = other RNA

SEQ ID NO: 1635 - RNA, 37 nt, synthetic construct
  source 1..37: mol_type = other RNA
attgctccttacgaggagactggccgccagcccagtt

SEQ ID NO: 1636 - RNA, 37 nt, synthetic construct
  source 1..37: mol_type = other RNA
attgctccttacgaggagaccttccgctcacctccgc

SEQ ID NO: 1637 - RNA, 37 nt, synthetic construct
  source 1..37: mol_type = other RNA
attgctccttacgaggagaccagggcctgtctgggga

SEQ ID NO: 1638 - RNA, 37 nt, synthetic construct
  source 1..37: mol_type = other RNA
attgctccttacgaggagactccccagccctgctcgt

SEQ ID NO: 1639 - RNA, 37 nt, synthetic construct
  source 1..37: mol_type = other RNA
attgctccttacgaggagacggtcaccacgagcaggg

SEQ ID NO: 1640 - RNA, 37 nt, synthetic construct
  source 1..37: mol_type = other RNA
attgctccttacgaggagactccccttcggtcaccac

SEQ ID NO: 1641 - RNA, 37 nt, synthetic construct
  source 1..37: mol_type = other RNA
attgctccttacgaggagacgagaagctgcaggtgaa

SEQ ID NO: 1642 - RNA, 37 nt, synthetic construct
  source 1..37: mol_type = other RNA
attgctccttacgaggagacacctgcagcttctccaa

SEQ ID NO: 1643 - RNA, 37 nt, synthetic construct
  source 1..37: mol_type = other RNA
attgctccttacgaggagactccaacacatcggagag

SEQ ID NO: 1644 - RNA, 37 nt, synthetic construct
  source 1..37: mol_type = other RNA
attgctccttacgaggagacgcacgaagctctccgat

SEQ ID NO: 1645 - RNA, 37 nt, synthetic construct
  source 1..37: mol_type = other RNA
attgctccttacgaggagacagcacgaagctctccga

SEQ ID NO: 1646 - RNA, 37 nt, synthetic construct
  source 1..37: mol_type = other RNA
attgctccttacgaggagacgtgctaaactggtaccg

SEQ ID NO: 1647 - RNA, 37 nt, synthetic construct
  source 1..37: mol_type = other RNA
attgctccttacgaggagacctggggctcatgcggta

SEQ ID NO: 1648 - RNA, 37 nt, synthetic construct
  source 1..37: mol_type = other RNA
attgctccttacgaggagactccgtctggttgctggg

SEQ ID NO: 1649 - RNA, 37 nt, synthetic construct
  source 1..37: mol_type = other RNA
attgctccttacgaggagaccccgaggaccgcagcca

SEQ ID NO: 1650 - RNA, 37 nt, synthetic construct
  source 1..37: mol_type = other RNA
attgctccttacgaggagactgtgacacggaagcggc

SEQ ID NO: 1651 - RNA, 37 nt, synthetic construct
  source 1..37: mol_type = other RNA
attgctccttacgaggagaccgtgtcacacaactgcc

SEQ ID NO: 1652 - RNA, 37 nt, synthetic construct
  source 1..37: mol_type = other RNA
attgctccttacgaggagacggcagttgtgtgacacg

SEQ ID NO: 1653 - RNA, 37 nt, synthetic construct
  source 1..37: mol_type = other RNA
attgctccttacgaggagaccacatgagcgtggtcag

SEQ ID NO: 1654 - RNA, 37 nt, synthetic construct
  source 1..37: mol_type = other RNA
attgctccttacgaggagaccgccgggccctgaccac

SEQ ID NO: 1655 - RNA, 37 nt, synthetic construct
  source 1..37: mol_type = other RNA
attgctccttacgaggagacggggccagggagatggc

SEQ ID NO: 1656 - RNA, 37 nt, synthetic construct
  source 1..37: mol_type = other RNA
attgctccttacgaggagacatctgcgccttgggggc

SEQ ID NO: 1657 - RNA, 37 nt, synthetic construct
  source 1..37: mol_type = other RNA
attgctccttacgaggagacgatctgcgccttggggg

SEQ ID NO: 1658 - RNA, 37 nt, synthetic construct
  source 1..37: mol_type = other RNA
attgctccttacgaggagacccagacaggccctggaa

SEQ ID NO: 1659 - RNA, 37 nt, synthetic construct
  source 1..37: mol_type = other RNA
attgctccttacgaggagacccagccctgctcgtggt

SEQ ID NO: 1660 - RNA, 37 nt, synthetic construct
  source 1..37: mol_type = other RNA
attgctccttacgaggagactctctggaagggcacaa

SEQ ID NO: 1661 - RNA, 37 nt, synthetic construct
  source 1..37: mol_type = other RNA
attgctccttacgaggagacgtgcccttccagagaga

SEQ ID NO: 1662 - RNA, 37 nt, synthetic construct
  source 1..37: mol_type = other RNA
attgctccttacgaggagactgcccttccagagagaa

SEQ ID NO: 1663 - RNA, 37 nt, synthetic construct
  source 1..37: mol_type = other RNA
attgctccttacgaggagactgcccttctctctggaa

SEQ ID NO: 1664 - RNA, 37 nt, synthetic construct
  source 1..37: mol_type = other RNA
attgctccttacgaggagaccagagagaagggcagaa

SEQ ID NO: 1665 - RNA, 37 nt, synthetic construct
  source 1..37: mol_type = other RNA
attgctccttacgaggagacgaactggccggctggcc

SEQ ID NO: 1666 - RNA, 37 nt, synthetic construct
  source 1..37: mol_type = other RNA
attgctccttacgaggagacggaactggccggctggc

SEQ ID NO: 1667 - RNA, 37 nt, synthetic construct
  source 1..37: mol_type = other RNA
attgctccttacgaggagaccaaaccctggtggttgg

SEQ ID NO: 1668 - RNA, 37 nt, synthetic construct
  source 1..37: mol_type = other RNA
attgctccttacgaggagacgtgtcgtgggcggcctg

SEQ ID NO: 1669 - RNA, 37 nt, synthetic construct
  source 1..37: mol_type = other RNA
attgctccttacgaggagaccctcgtgcggcccggga

SEQ ID NO: 1670 - RNA, 37 nt, synthetic construct
  source 1..37: mol_type = other RNA
attgctccttacgaggagactccctgcagagaaacac

SEQ ID NO: 1671 - RNA, 37 nt, synthetic construct
  source 1..37: mol_type = other RNA
attgctccttacgaggagacctctgcagggacaatag

SEQ ID NO: 1672 - RNA, 37 nt, synthetic construct
  source 1..37: mol_type = other RNA
attgctccttacgaggagactctgcagggacaatagg

SEQ ID NO: 1673 - RNA, 37 nt, synthetic construct
  source 1..37: mol_type = other RNA
attgctccttacgaggagacctcctcaaagaaggagg

SEQ ID NO: 1674 - RNA, 37 nt, synthetic construct
  source 1..37: mol_type = other RNA
attgctccttacgaggagactcctcaaagaaggagga

SEQ ID NO: 1675 - RNA, 37 nt, synthetic construct
  source 1..37: mol_type = other RNA
attgctccttacgaggagactctgtggactatgggga

SEQ ID NO: 1676 - RNA, 37 nt, synthetic construct
  source 1..37: mol_type = other RNA
attgctccttacgaggagactctcgccactggaaatc

SEQ ID NO: 1677 - RNA, 37 nt, synthetic construct
  source 1..37: mol_type = other RNA
attgctccttacgaggagacccagtggcgagagaaga

SEQ ID NO: 1678 - RNA, 37 nt, synthetic construct
  source 1..37: mol_type = other RNA
attgctccttacgaggagaccagtggcgagagaagac

SEQ ID NO: 1679 - RNA, 37 nt, synthetic construct
  source 1..37: mol_type = other RNA
attgctccttacgaggagaccgctaggaaagacaatg

SEQ ID NO: 1680 - RNA, 37 nt, synthetic construct
  source 1..37: mol_type = other RNA
attgctccttacgaggagactctttcctagcggaatg

SEQ ID NO: 1681 - RNA, 37 nt, synthetic construct
  source 1..37: mol_type = other RNA
attgctccttacgaggagaccctagcggaatgggcac

SEQ ID NO: 1682 - RNA, 37 nt, synthetic construct
  source 1..37: mol_type = other RNA
attgctccttacgaggagacctagcggaatgggcacc

SEQ ID NO: 1683 - RNA, 37 nt, synthetic construct
  source 1..37: mol_type = other RNA
attgctccttacgaggagacgcccctctgaccggctt

SEQ ID NO: 1684 - RNA, 37 nt, synthetic construct
  source 1..37: mol_type = other RNA
attgctccttacgaggagaccttggccaccagtgttc

SEQ ID NO: 1685 - RNA, 37 nt, synthetic construct
  source 1..37: mol_type = other RNA
attgctccttacgaggagacgccaccagtgttctgca

SEQ ID NO: 1686 - RNA, 37 nt, synthetic construct
  source 1..37: mol_type = other RNA
attgctccttacgaggagactgcagaccctccaccat

SEQ ID NO: 1687 - RNA, 37 nt, synthetic construct
  source 1..37: mol_type = other RNA
attgctccttacgaggagactcctgaggaaatgcgct

SEQ ID NO: 1688 - RNA, 37 nt, synthetic construct
  source 1..37: mol_type = other RNA
attgctccttacgaggagaccctcaggagaagcaggc

SEQ ID NO: 1689 - RNA, 37 nt, synthetic construct
  source 1..37: mol_type = other RNA
attgctccttacgaggagacctcaggagaagcaggca

SEQ ID NO: 1690 - RNA, 37 nt, synthetic construct
  source 1..37: mol_type = other RNA
attgctccttacgaggagaccaggccgtccaggggct

SEQ ID NO: 1691 - RNA, 37 nt, synthetic construct
  source 1..37: mol_type = other RNA
attgctccttacgaggagacagacatgagtcctgtgg

SEQ ID NO: 1692 - RNA, 37 nt, synthetic construct
  source 1..37: mol_type = other RNA
attgctccttacgaggagacaggtcctgccagcacag

SEQ ID NO: 1693 - RNA, 37 nt, synthetic construct
  source 1..37: mol_type = other RNA
attgctccttacgaggagacagggagctggacgcagg

SEQ ID NO: 1694 - RNA, 37 nt, synthetic construct
  source 1..37: mol_type = other RNA
attgctccttacgaggagacagccccgggccgcaggc

SEQ ID NO: 1695 - RNA, 37 nt, synthetic construct
  source 1..37: mol_type = other RNA
attgctccttacgaggagacaggcaggaggctccggg

SEQ ID NO: 1696 - RNA, 37 nt, synthetic construct
  source 1..37: mol_type = other RNA
attgctccttacgaggagacggggctggttggagatg

SEQ ID NO: 1697 - RNA, 37 nt, synthetic construct
  source 1..37: mol_type = other RNA
attgctccttacgaggagacgagatggccttggagca

SEQ ID NO: 1698 - RNA, 37 nt, synthetic construct
  source 1..37: mol_type = other RNA
attgctccttacgaggagacgctgctccaaggccatc

SEQ ID NO: 1699 - RNA, 37 nt, synthetic construct
  source 1..37: mol_type = other RNA
attgctccttacgaggagacgagcagccaaggtgccc

SEQ ID NO: 1700 - RNA, 37 nt, synthetic construct
  source 1..37: mol_type = other RNA
attgctccttacgaggagacgggatgccactgccagg

SEQ ID NO: 1701 - RNA, 37 nt, synthetic construct
  source 1..37: mol_type = other RNA
attgctccttacgaggagaccgggatgccactgccag

SEQ ID NO: 1702 - RNA, 37 nt, synthetic construct
  source 1..37: mol_type = other RNA
attgctccttacgaggagacggccctgcgtccagggc

SEQ ID NO: 1703 - RNA, 37 nt, synthetic construct
  source 1..37: mol_type = other RNA
attgctccttacgaggagactctgctccctgcaggcc

SEQ ID NO: 1704 - RNA, 37 nt, synthetic construct
  source 1..37: mol_type = other RNA
attgctccttacgaggagactctaggcctgcagggag

SEQ ID NO: 1705 - RNA, 37 nt, synthetic construct
  source 1..37: mol_type = other RNA
attgctccttacgaggagaccctgaaacttctctagg

SEQ ID NO: 1706 - RNA, 37 nt, synthetic construct
  source 1..37: mol_type = other RNA
attgctccttacgaggagactgaccttccctgaaact

SEQ ID NO: 1707 - RNA, 37 nt, synthetic construct
  source 1..37: mol_type = other RNA
attgctccttacgaggagaccagggaaggtcagaaga

SEQ ID NO: 1708 - RNA, 37 nt, synthetic construct
  source 1..37: mol_type = other RNA
attgctccttacgaggagacagggaaggtcagaagag

SEQ ID NO: 1709 - RNA, 37 nt, synthetic construct
  source 1..37: mol_type = other RNA
attgctccttacgaggagacctgccctgcccaccaca

SEQ ID NO: 1710 - RNA, 37 nt, synthetic construct
  source 1..37: mol_type = other RNA
attgctccttacgaggagaccctgccctgcccaccac

SEQ ID NO: 1711 - RNA, 37 nt, synthetic construct
  source 1..37: mol_type = other RNA
attgctccttacgaggagacacacatgcccaggcagc

SEQ ID NO: 1712 - RNA, 37 nt, synthetic construct
  source 1..37: mol_type = other RNA
attgctccttacgaggagaccacatgcccaggcagca

SEQ ID NO: 1713 - RNA, 37 nt, synthetic construct
  source 1..37: mol_type = other RNA
attgctccttacgaggagaccctgccccacaaagggc

SEQ ID NO: 1714 - RNA, 37 nt, synthetic construct
  source 1..37: mol_type = other RNA
attgctccttacgaggagacgtggggcagggaagctg

SEQ ID NO: 1715 - RNA, 37 nt, synthetic construct
  source 1..37: mol_type = other RNA
attgctccttacgaggagactggggcagggaagctga

SEQ ID NO: 1716 - RNA, 37 nt, synthetic construct
  source 1..37: mol_type = other RNA
attgctccttacgaggagacctgcctcagcttccctg

SEQ ID NO: 1717 - RNA, 37 nt, synthetic construct
  source 1..37: mol_type = other RNA
attgctccttacgaggagaccaggcccagccagcact

SEQ ID NO: 1718 - RNA, 37 nt, synthetic construct
  source 1..37: mol_type = other RNA
attgctccttacgaggagacaggcccagccagcactc

SEQ ID NO: 1719 - RNA, 37 nt, synthetic construct
  source 1..37: mol_type = other RNA
attgctccttacgaggagaccaccccagcccctcaca

SEQ ID NO: 1720 - RNA, 37 nt, synthetic construct
  source 1..37: mol_type = other RNA
attgctccttacgaggagacggaccgtaggatgtccc

SEQ ID NO: 1721 - RNA, 37 nt, synthetic construct
  source 1..37: mol_type = other RNA
attgctccttacgaggagacctacacaatgcgttgcc

SEQ ID NO: 1722 - RNA, 37 nt, synthetic construct
  source 1..37: mol_type = other RNA
attgctccttacgaggagacgggctctgacaggtagg

SEQ ID NO: 1723 - RNA, 37 nt, synthetic construct
  source 1..37: mol_type = other RNA
attgctccttacgaggagactgtaggaatcccagcca

SEQ ID NO: 1724 - RNA, 37 nt, synthetic construct
  source 1..37: mol_type = other RNA
attgctccttacgaggagaccctggctccacgccctg

SEQ ID NO: 1725 - RNA, 37 nt, synthetic construct
  source 1..37: mol_type = other RNA
attgctccttacgaggagacgggaagctgagggcacg

SEQ ID NO: 1726 - RNA, 37 nt, synthetic construct
  source 1..37: mol_type = other RNA
attgctccttacgaggagacacagcgatgctgacccc

SEQ ID NO: 1727 - RNA, 37 nt, synthetic construct
  source 1..37: mol_type = other RNA
attgctccttacgaggagacttaacagcgatgctgac

SEQ ID NO: 1728 - RNA, 37 nt, synthetic construct
  source 1..37: mol_type = other RNA
attgctccttacgaggagactatgaccagatggacct

SEQ ID NO: 1729 - RNA, 37 nt, synthetic construct
  source 1..37: mol_type = other RNA
attgctccttacgaggagacgggcccctagaaggtgg

SEQ ID NO: 1730 - RNA, 37 nt, synthetic construct
  source 1..37: mol_type = other RNA
attgctccttacgaggagactaggggccccaactcca

SEQ ID NO: 1731 - RNA, 37 nt, synthetic construct
  source 1..37: mol_type = other RNA
attgctccttacgaggagacagaagctccaggtagcc

SEQ ID NO: 1732 - RNA, 37 nt, synthetic construct
  source 1..37: mol_type = other RNA
attgctccttacgaggagactccagccaggtccatct

SEQ ID NO: 1733 - RNA, 37 nt, synthetic construct
  source 1..37: mol_type = other RNA
attgctccttacgaggagacttctccagccaggtcca

SEQ ID NO: 1734 - RNA, 37 nt, synthetic construct
  source 1..37: mol_type = other RNA
attgctccttacgaggagacccgctgttgccgccgct

SEQ ID NO: 1735 - RNA, 37 nt, synthetic construct
  source 1..37: mol_type = other RNA
attgctccttacgaggagacccgccgctgctgctgct

SEQ ID NO: 1736 - RNA, 37 nt, synthetic construct
  source 1..37: mol_type = other RNA
attgctccttacgaggagacctgctactgtgccccac

SEQ ID NO: 1737 - RNA, 37 nt, synthetic construct
  source 1..37: mol_type = other RNA
attgctccttacgaggagacataatctccatcctcgt

SEQ ID NO: 1738 - RNA, 37 nt, synthetic construct
  source 1..37: mol_type = other RNA
attgctccttacgaggagactgaagagctgatgctcg

SEQ ID NO: 1739 - RNA, 37 nt, synthetic construct
  source 1..37: mol_type = other RNA
attgctccttacgaggagacgagcaacggcggaaggt

SEQ ID NO: 1740 - RNA, 37 nt, synthetic construct
  source 1..37: mol_type = other RNA
attgctccttacgaggagacctggcagcctccaggcc

SEQ ID NO: 1741 - RNA, 37 nt, synthetic construct
  source 1..37: mol_type = other RNA
attgctccttacgaggagactggtgctgatggaggag

SEQ ID NO: 1742 - RNA, 37 nt, synthetic construct
  source 1..37: mol_type = other RNA
attgctccttacgaggagacaatctgtagcctctggg

SEQ ID NO: 1743 - RNA, 37 nt, synthetic construct
  source 1..37: mol_type = other RNA
attgctccttacgaggagacttcaatctgtagcctct

SEQ ID NO: 1744 - RNA, 37 nt, synthetic construct
  source 1..37: mol_type = other RNA
attgctccttacgaggagacgttcaatctgtagcctc

SEQ ID NO: 1745 - RNA, 37 nt, synthetic construct
  source 1..37: mol_type = other RNA
attgctccttacgaggagacaacaaactgcccaccgc

SEQ ID NO: 1746 - RNA, 37 nt, synthetic construct
  source 1..37: mol_type = other RNA
attgctccttacgaggagacatgacatagccccggcg

SEQ ID NO: 1747 - RNA, 37 nt, synthetic construct
  source 1..37: mol_type = other RNA
attgctccttacgaggagactacatatcttttatgac

SEQ ID NO: 1748 - RNA, 37 nt, synthetic construct
  source 1..37: mol_type = other RNA
attgctccttacgaggagactatgacctcttccctgg

SEQ ID NO: 1749 - RNA, 37 nt, synthetic construct
  source 1..37: mol_type = other RNA
attgctccttacgaggagacatgacctcttccctggc

SEQ ID NO: 1750 - RNA, 37 nt, synthetic construct
  source 1..37: mol_type = other RNA
attgctccttacgaggagactgacctcttccctggct

SEQ ID NO: 1751 - RNA, 37 nt, synthetic construct
  source 1..37: mol_type = other RNA
attgctccttacgaggagacaccaagaagccagggaa

SEQ ID NO: 1752 - RNA, 37 nt, synthetic construct
  source 1..37: mol_type = other RNA
attgctccttacgaggagaccctggcttcttggtgaa

SEQ ID NO: 1753 - RNA, 37 nt, synthetic construct
  source 1..37: mol_type = other RNA
attgctccttacgaggagacttggtgaagatgagcag

SEQ ID NO: 1754 - RNA, 37 nt, synthetic construct
  source 1..37: mol_type = other RNA
attgctccttacgaggagacgtgaagatgagcagtga

SEQ ID NO: 1755 - RNA, 37 nt, synthetic construct
  source 1..37: mol_type = other RNA
attgctccttacgaggagacccccatgtggagtacat

SEQ ID NO: 1756 - RNA, 37 nt, synthetic construct
  source 1..37: mol_type = other RNA
attgctccttacgaggagacctcaatgtactccacat

SEQ ID NO: 1757 - RNA, 37 nt, synthetic construct
  source 1..37: mol_type = other RNA
attgctccttacgaggagacaggaagactcctttgtc

SEQ ID NO: 1758 - RNA, 37 nt, synthetic construct
  source 1..37: mol_type = other RNA
attgctccttacgaggagacgtcttcgcccagagcat

SEQ ID NO: 1759 - RNA, 37 nt, synthetic construct
  source 1..37: mol_type = other RNA
attgctccttacgaggagactcttcgcccagagcatc

SEQ ID NO: 1760 - RNA, 37 nt, synthetic construct
  source 1..37: mol_type = other RNA
attgctccttacgaggagacgcccagagcatcccatg

SEQ ID NO: 1761 - RNA, 37 nt, synthetic construct
  source 1..37: mol_type = other RNA
attgctccttacgaggagaccatgggatgctctgggc

SEQ ID NO: 1762 - RNA, 37 nt, synthetic construct
  source 1..37: mol_type = other RNA
attgctccttacgaggagacgctccaggttccatggg

SEQ ID NO: 1763 - RNA, 37 nt, synthetic construct
  source 1..37: mol_type = other RNA
attgctccttacgaggagactcccagcatggcaccag

SEQ ID NO: 1764 - RNA, 37 nt, synthetic construct
  source 1..37: mol_type = other RNA
attgctccttacgaggagacctctgtctggtgccatg

SEQ ID NO: 1765 - RNA, 37 nt, synthetic construct
  source 1..37: mol_type = other RNA
attgctccttacgaggagacgataccagcatccaggg

SEQ ID NO: 1766 - RNA, 37 nt, synthetic construct
  source 1..37: mol_type = other RNA
attgctccttacgaggagacagggcagggtcaccatc

SEQ ID NO: 1767 - RNA, 37 nt, synthetic construct
  source 1..37: mol_type = other RNA
attgctccttacgaggagacaagtcggtgatggtgac

SEQ ID NO: 1768 - RNA, 37 nt, synthetic construct
  source 1..37: mol_type = other RNA
attgctccttacgaggagacaacagcgtgccggagga

SEQ ID NO: 1769 - RNA, 37 nt, synthetic construct
  source 1..37: mol_type = other RNA
attgctccttacgaggagacgccacaccagcatcccg

SEQ ID NO: 1770 - RNA, 37 nt, synthetic construct
  source 1..37: mol_type = other RNA
attgctccttacgaggagacagcacacgcaggctgtg

SEQ ID NO: 1771 - RNA, 37 nt, synthetic construct
  source 1..37: mol_type = other RNA
attgctccttacgaggagacacagttgagcacacgca

SEQ ID NO: 1772 - RNA, 37 nt, synthetic construct
  source 1..37: mol_type = other RNA
attgctccttacgaggagacccttgacagttgagcac

SEQ ID NO: 1773 - RNA, 37 nt, synthetic construct
  source 1..37: mol_type = other RNA
attgctccttacgaggagacgctgactcttccgaata

SEQ ID NO: 1774 - RNA, 37 nt, synthetic construct
  source 1..37: mol_type = other RNA
attgctccttacgaggagacattcggaagagtcagct

SEQ ID NO: 1775 - RNA, 37 nt, synthetic construct
  source 1..37: mol_type = other RNA
attgctccttacgaggagacttcggaagagtcagcta

SEQ ID NO: 1776 - RNA, 37 nt, synthetic construct
  source 1..37: mol_type = other RNA
attgctccttacgaggagacggaagagtcagctaatc

SEQ ID NO: 1777 - RNA, 37 nt, synthetic construct
  source 1..37: mol_type = other RNA
attgctccttacgaggagactgctgcccctggccggt

SEQ ID NO: 1778 - RNA, 37 nt, synthetic construct
  source 1..37: mol_type = other RNA
attgctccttacgaggagacaggatgcggctataccc

SEQ ID NO: 1779 - RNA, 37 nt, synthetic construct
  source 1..37: mol_type = other RNA
attgctccttacgaggagacccagctgctgcaaccag

SEQ ID NO: 1780 - RNA, 37 nt, synthetic construct
  source 1..37: mol_type = other RNA
attgctccttacgaggagaccagcagctgggaacttc

SEQ ID NO: 1781 - RNA, 37 nt, synthetic construct
  source 1..37: mol_type = other RNA
attgctccttacgaggagaccgggacgacgcctgcct

SEQ ID NO: 1782 - RNA, 37 nt, synthetic construct
  source 1..37: mol_type = other RNA
attgctccttacgaggagacgtggccccgactgtgat

SEQ ID NO: 1783 - RNA, 37 nt, synthetic construct
  source 1..37: mol_type = other RNA
attgctccttacgaggagacccttggggactttgggg

SEQ ID NO: 1784 - RNA, 37 nt, synthetic construct
  source 1..37: mol_type = other RNA
attgctccttacgaggagacgtccccaaagtccccaa

SEQ ID NO: 1785 - RNA, 37 nt, synthetic construct
  source 1..37: mol_type = other RNA
attgctccttacgaggagacgggactttggggactaa

SEQ ID NO: 1786 - RNA, 37 nt, synthetic construct
  source 1..37: mol_type = other RNA
attgctccttacgaggagacggggactaattttggac

SEQ ID NO: 1787 - RNA, 37 nt, synthetic construct
  source 1..37: mol_type = other RNA
attgctccttacgaggagacgggactaattttggacg

SEQ ID NO: 1788 - RNA, 37 nt, synthetic construct
  source 1..37: mol_type = other RNA
attgctccttacgaggagactggacgctgtgtggatc

SEQ ID NO: 1789 - RNA, 37 nt, synthetic construct
  source 1..37: mol_type = other RNA
attgctccttacgaggagacggacgctgtgtggatct

SEQ ID NO: 1790 - RNA, 37 nt, synthetic construct
  source 1..37: mol_type = other RNA
attgctccttacgaggagacgacgctgtgtggatctc

SEQ ID NO: 1791 - RNA, 37 nt, synthetic construct
  source 1..37: mol_type = other RNA
attgctccttacgaggagacccgggggcaaagagatc

SEQ ID NO: 1792 - RNA, 37 nt, synthetic construct
  source 1..37: mol_type = other RNA
attgctccttacgaggagacgcccccgggaaggacat

SEQ ID NO: 1793 - RNA, 37 nt, synthetic construct
  source 1..37: mol_type = other RNA
attgctccttacgaggagaccccccgggaaggacatc

SEQ ID NO: 1794 - RNA, 37 nt, synthetic construct
  source 1..37: mol_type = other RNA
attgctccttacgaggagacatgtcacagagtgggac

SEQ ID NO: 1795 - RNA, 37 nt, synthetic construct
  source 1..37: mol_type = other RNA
attgctccttacgaggagactggctcggatgctgagc

SEQ ID NO: 1796 - RNA, 37 nt, synthetic construct
  source 1..37: mol_type = other RNA
attgctccttacgaggagacccctggccgagctgcgg

SEQ ID NO: 1797 - RNA, 37 nt, synthetic construct
  source 1..37: mol_type = other RNA
attgctccttacgaggagacgtagagaagtggatcag

SEQ ID NO: 1798 - RNA, 37 nt, synthetic construct
  source 1..37: mol_type = other RNA
attgctccttacgaggagacggtagagaagtggatca

SEQ ID NO: 1799 - RNA, 37 nt, synthetic construct
  source 1..37: mol_type = other RNA
attgctccttacgaggagactctaccaaagacgtcat

SEQ ID NO: 1800 - RNA, 37 nt, synthetic construct
  source 1..37: mol_type = other RNA
attgctccttacgaggagacatgacgtctttggtaga

SEQ ID NO: 1801 - RNA, 37 nt, synthetic construct
  source 1..37: mol_type = other RNA
attgctccttacgaggagaccctgaggaccagcaggt

SEQ ID NO: 1802 - RNA, 37 nt, synthetic construct
  source 1..37: mol_type = other RNA
attgctccttacgaggagacggggtcagcacctgctg

SEQ ID NO: 1803 - RNA, 37 nt, synthetic construct
  source 1..37: mol_type = other RNA
attgctccttacgaggagacgagtgggccccgagtgt

SEQ ID NO: 1804 - RNA, 37 nt, synthetic construct
  source 1..37: mol_type = other RNA
attgctccttacgaggagactggggcacagcgggctg

SEQ ID NO: 1805 - RNA, 37 nt, synthetic construct
  source 1..37: mol_type = other RNA
attgctccttacgaggagactccaggagcgggaggcg

SEQ ID NO: 1806 - RNA, 37 nt, synthetic construct
  source 1..37: mol_type = other RNA
attgctccttacgaggagaccagacctgctggcctcc

SEQ ID NO: 1807 - RNA, 37 nt, synthetic construct
  source 1..37: mol_type = other RNA
attgctccttacgaggagacagggccttgcagacctg

SEQ ID NO: 1808 - RNA, 37 nt, synthetic construct
  source 1..37: mol_type = other RNA
attgctccttacgaggagacgggggtgagggtgtcta

SEQ ID NO: 1809 - RNA, 37 nt, synthetic construct
  source 1..37: mol_type = other RNA
attgctccttacgaggagacggggtgagggtgtctat

SEQ ID NO: 1810 - RNA, 37 nt, synthetic construct
  source 1..37: mol_type = other RNA
attgctccttacgaggagacgcacggggaaccaggca

SEQ ID NO: 1811 - RNA, 37 nt, synthetic construct
  source 1..37: mol_type = other RNA
attgctccttacgaggagaccccgtgccaactgcagc

SEQ ID NO: 1812 - RNA, 37 nt, synthetic construct
  source 1..37: mol_type = other RNA
attgctccttacgaggagactggatgctgcagttggc

SEQ ID NO: 1813 - RNA, 37 nt, synthetic construct
  source 1..37: mol_type = other RNA
attgctccttacgaggagactggtggcagtggacatg

SEQ ID NO: 1814 - RNA, 37 nt, synthetic construct
  source 1..37: mol_type = other RNA
attgctccttacgaggagaccacttcccaatggaagc

SEQ ID NO: 1815 - RNA, 37 nt, synthetic construct
  source 1..37: mol_type = other RNA
attgctccttacgaggagaccattgggaagtggaaga

SEQ ID NO: 1816 - RNA, 37 nt, synthetic construct
  source 1..37: mol_type = other RNA
attgctccttacgaggagacggaagtggaagacctta

SEQ ID NO: 1817 - RNA, 37 nt, synthetic construct
  source 1..37: mol_type = other RNA
attgctccttacgaggagacgtgtccggaggcagcct

SEQ ID NO: 1818 - RNA, 37 nt, synthetic construct
  source 1..37: mol_type = other RNA
attgctccttacgaggagacgccaccaggcggccagt

SEQ ID NO: 1819 - RNA, 37 nt, synthetic construct
  source 1..37: mol_type = other RNA
attgctccttacgaggagacctgctgccatgccccag

SEQ ID NO: 1820 - RNA, 37 nt, synthetic construct
  source 1..37: mol_type = other RNA
attgctccttacgaggagaccagccctggggcatggc

SEQ ID NO: 1821 - RNA, 37 nt, synthetic construct
  source 1..37: mol_type = other RNA
attgctccttacgaggagaccattccagccctggggc

SEQ ID NO: 1822 - RNA, 37 nt, synthetic construct
  source 1..37: mol_type = other RNA
attgctccttacgaggagacgcattccagccctgggg

SEQ ID NO: 1823 - RNA, 37 nt, synthetic construct
  source 1..37: mol_type = other RNA
attgctccttacgaggagactgcattccagccctggg

SEQ ID NO: 1824 - RNA, 37 nt, synthetic construct
  source 1..37: mol_type = other RNA
attgctccttacgaggagacattttgcattccagccc

SEQ ID NO: 1825 - RNA, 37 nt, synthetic construct
  source 1..37: mol_type = other RNA
attgctccttacgaggagaccatccagtcagggtcca

SEQ ID NO: 1826 - RNA, 37 nt, synthetic construct
  source 1..37: mol_type = other RNA
attgctccttacgaggagactccacgctgtaggctcc

SEQ ID NO: 1827 - RNA, 37 nt, synthetic construct
  source 1..37: mol_type = other RNA
attgctccttacgaggagacccacacacaggttgtcc

SEQ ID NO: 1828 - RNA, 37 nt, synthetic construct
  source 1..37: mol_type = other RNA
attgctccttacgaggagactccactggtcctgtctg

SEQ ID NO: 1829 - RNA, 37 nt, synthetic construct
  source 1..37: mol_type = other RNA
attgctccttacgaggagacctgaaggccggctccgg

SEQ ID NO: 1830 - DNA, 37 bp, synthetic construct
  source 1..37: mol_type = other DNA
attgctccttacgaggagacgaagctatgttttccat

SEQ ID NO: 1831 - DNA, 37 bp, synthetic construct
  source 1..37: mol_type = other DNA
attgctccttacgaggagacgcaggggcagccgcccc

SEQ ID NO: 1832 - DNA, 37 bp, synthetic construct
  source 1..37: mol_type = other DNA
attgctccttacgaggagacctcctagaacccaacag

SEQ ID NO: 1833 - DNA, 37 bp, synthetic construct
  source 1..37: mol_type = other DNA
attgctccttacgaggagacgaaagacctcctctgtg

SEQ ID NO: 1834 - DNA, 37 bp, synthetic construct
  source 1..37: mol_type = other DNA
attgctccttacgaggagactccatctcggggttggc

SEQ ID NO: 1835 - DNA, 37 bp, synthetic construct
  source 1..37: mol_type = other DNA
attgctccttacgaggagacttcctgatggtggagat

SEQ ID NO: 1836 - DNA, 37 bp, synthetic construct
  source 1..37: mol_type = other DNA
attgctccttacgaggagacctgactcccagctctga

SEQ ID NO: 1837 - DNA, 37 bp, synthetic construct
  source 1..37: mol_type = other DNA
attgctccttacgaggagactggggtcagagctggga

SEQ ID NO: 1838 - DNA, 37 bp, synthetic construct; identical to SEQ ID NO: 1833
  source 1..37: mol_type = other DNA

SEQ ID NO: 1839 - DNA, 37 bp, synthetic construct
  source 1..37: mol_type = other DNA
attgctccttacgaggagaccgaagctatgttttcca

SEQ ID NO: 1840 - DNA, 37 bp, synthetic construct; identical to SEQ ID NO: 1830
  source 1..37: mol_type = other DNA

SEQ ID NO: 1841 - DNA, 37 bp, synthetic construct
  source 1..37: mol_type = other DNA
attgctccttacgaggagactccatctccaccatcag

SEQ ID NO: 1842 - DNA, 37 bp, synthetic construct
  source 1..37: mol_type = other DNA
attgctccttacgaggagacccatctccaccatcagg

SEQ ID NO: 1843 - DNA, 37 bp, synthetic construct
  source 1..37: mol_type = other DNA
attgctccttacgaggagacctgatggtggagatgga

SEQ ID NO: 1844 - DNA, 37 bp, synthetic construct
  source 1..37: mol_type = other DNA
attgctccttacgaggagaccatctccaccatcagga

SEQ ID NO: 1845 - DNA, 37 bp, synthetic construct; identical to SEQ ID NO: 1835
  source 1..37: mol_type = other DNA

SEQ ID NO: 1846 - DNA, 37 bp, synthetic construct; identical to SEQ ID NO: 1831
  source 1..37: mol_type = other DNA

SEQ ID NO: 1847 - DNA, 37 bp, synthetic construct; identical to SEQ ID NO: 1834
  source 1..37: mol_type = other DNA

SEQ ID NO: 1848 - DNA, 37 bp, synthetic construct
  source 1..37: mol_type = other DNA
attgctccttacgaggagactaggagcaaattgtcca

SEQ ID NO: 1849 - DNA, 37 bp, synthetic construct
  source 1..37: mol_type = other DNA
attgctccttacgaggagacggttctaggagcaaatt

SEQ ID NO: 1850 - DNA, 37 bp, synthetic construct
  source 1..37: mol_type = other DNA
attgctccttacgaggagacgctcctagaacccaaca

SEQ ID NO: 1851 - DNA, 37 bp, synthetic construct; identical to SEQ ID NO: 1832
  source 1..37: mol_type = other DNA

SEQ ID NO: 1852 - DNA, 37 bp, synthetic construct
  source 1..37: mol_type = other DNA
attgctccttacgaggagactccagacgccatctttc

SEQ ID NO: 1853 - DNA, 37 bp, synthetic construct
  source 1..37: mol_type = other DNA
attgctccttacgaggagactggtaagagtcctcctg

SEQ ID NO: 1854 - DNA, 37 bp, synthetic construct
  source 1..37: mol_type = other DNA
attgctccttacgaggagacttacagcatcttgggtc

SEQ ID NO: 1855 - DNA, 37 bp, synthetic construct
  source 1..37: mol_type = other DNA
attgctccttacgaggagacggtcaggtgggccggca

SEQ ID NO: 1856 - DNA, 37 bp, synthetic construct
  source 1..37: mol_type = other DNA
attgctccttacgaggagacctatcattggagatgac

SEQ ID NO: 1857 - DNA, 37 bp, synthetic construct
  source 1..37: mol_type = other DNA
attgctccttacgaggagacgagatgacattaaccgg

SEQ ID NO: 1858 - DNA, 37 bp, synthetic construct
  source 1..37: mol_type = other DNA
attgctccttacgaggagactggaactctgtgtcgta

SEQ ID NO: 1859 - DNA, 37 bp, synthetic construct
  source 1..37: mol_type = other DNA
attgctccttacgaggagaccagaatttactggagca

SEQ ID NO: 1860 - DNA, 37 bp, synthetic construct
  source 1..37: mol_type = other DNA
attgctccttacgaggagacactggagcagctgcagc

SEQ ID NO: 1861 - DNA, 37 bp, synthetic construct
  source 1..37: mol_type = other DNA
attgctccttacgaggagacccagctgtgggctgcag

SEQ ID NO: 1862 - DNA, 37 bp, synthetic construct
  source 1..37: mol_type = other DNA
attgctccttacgaggagacgtaggcattcccagctg

SEQ ID NO: 1863 - DNA, 37 bp, synthetic construct
  source 1..37: mol_type = other DNA
attgctccttacgaggagacgtgaagagttcgtaggc

SEQ ID NO: 1864 - DNA, 37 bp, synthetic construct
  source 1..37: mol_type = other DNA
attgctccttacgaggagacaccaagattgcctccag

SEQ ID NO: 1865 - DNA, 37 bp, synthetic construct
  source 1..37: mol_type = other DNA
attgctccttacgaggagaccctccaggtacccacca

SEQ ID NO: 1866 - DNA, 37 bp, synthetic construct
  source 1..37: mol_type = other DNA
attgctccttacgaggagacctaatgtggatactaac

SEQ ID NO: 1867 - DNA, 37 bp, synthetic construct
  source 1..37: mol_type = other DNA
attgctccttacgaggagacttccgtgtggcagctga

SEQ ID NO: 1868 - DNA, 37 bp, synthetic construct
  source 1..37: mol_type = other DNA
attgctccttacgaggagacctgatggcaacttcaac

SEQ ID NO: 1869 - DNA, 37 bp, synthetic construct
  source 1..37: mol_type = other DNA
attgctccttacgaggagactactttgctagcaaact

SEQ ID NO: 1870 - DNA, 37 bp, synthetic construct
  source 1..37: mol_type = other DNA
attgctccttacgaggagacagcaccagtttgctagc

SEQ ID NO: 1871 - DNA, 37 bp, synthetic construct
  source 1..37: mol_type = other DNA
attgctccttacgaggagacaactggggccgggttgt

SEQ ID NO: 1872 - DNA, 37 bp, synthetic construct
  source 1..37: mol_type = other DNA
attgctccttacgaggagacttctctttcctgtagga

SEQ ID NO: 1873 - DNA, 37 bp, synthetic construct
  source 1..37: mol_type = other DNA
attgctccttacgaggagactctttcctgtaggatga

SEQ ID NO: 1874 - DNA, 37 bp, synthetic construct
  source 1..37: mol_type = other DNA
attgctccttacgaggagaccctgtaggatgattgct

SEQ ID NO: 1875 - DNA, 37 bp, synthetic construct
  source 1..37: mol_type = other DNA
attgctccttacgaggagacctgtaggatgattgcta

SEQ ID NO: 1876 - DNA, 37 bp, synthetic construct; identical to SEQ ID NO: 1866
  source 1..37: mol_type = other DNA

SEQ ID NO: 1877 - DNA, 37 bp, synthetic construct; identical to SEQ ID NO: 1867
  source 1..37: mol_type = other DNA

SEQ ID NO: 1878 - DNA, 37 bp, synthetic construct
  source 1..37: mol_type = other DNA
attgctccttacgaggagaccgtgtggcagctgacat

SEQ ID NO: 1879 - DNA, 37 bp, synthetic construct
  source 1..37: mol_type = other DNA
attgctccttacgaggagacccatcagcaaacatgtc

SEQ ID NO: 1880 - DNA, 37 bp, synthetic construct
  source 1..37: mol_type = other DNA
attgctccttacgaggagacaagttgccatcagcaaa

SEQ ID NO: 1881 - DNA, 37 bp, synthetic construct
  source 1..37: mol_type = other DNA
attgctccttacgaggagacgctgatggcaacttcaa

SEQ ID NO: 1882 - DNA, 37 bp, synthetic construct; identical to SEQ ID NO: 1868
  source 1..37: mol_type = other DNA

SEQ ID NO: 1883 - DNA, 37 bp, synthetic construct; identical to SEQ ID NO: 1871
  source 1..37: mol_type = other DNA

SEQ ID NO: 1884 - DNA, 37 bp, synthetic construct
  source 1..37: mol_type = other DNA
attgctccttacgaggagacttgcccttttctacttt

SEQ ID NO: 1885 - DNA, 37 bp, synthetic construct
  source 1..37: mol_type = other DNA
attgctccttacgaggagaccccttttctactttgct

SEQ ID NO: 1886 - DNA, 37 bp, synthetic construct
  source 1..37: mol_type = other DNA
attgctccttacgaggagacctagcaaagtagaaaag

SEQ ID NO: 1887 - DNA, 37 bp, synthetic construct
  source 1..37: mol_type = other DNA
attgctccttacgaggagacgctagcaaagtagaaaa

SEQ ID NO: 1888 - DNA, 37 bp, synthetic construct
  source 1..37: mol_type = other DNA
attgctccttacgaggagactctactttgctagcaaa

SEQ ID NO: 1889 - DNA, 37 bp, synthetic construct
  source 1..37: mol_type = other DNA
attgctccttacgaggagacctactttgctagcaaac

SEQ ID NO: 1890 - DNA, 37 bp, synthetic construct; identical to SEQ ID NO: 1869
  source 1..37: mol_type = other DNA

SEQ ID NO: 1891 - DNA, 37 bp, synthetic construct
  source 1..37: mol_type = other DNA
attgctccttacgaggagacgctagcaaactggtgct

SEQ ID NO: 1892 - DNA, 37 bp, synthetic construct
  source 1..37: mol_type = other DNA
attgctccttacgaggagacctagcaaactggtgctc

SEQ ID NO: 1893 - DNA, 37 bp, synthetic construct; identical to SEQ ID NO: 1870
  source 1..37: mol_type = other DNA

SEQ ID NO: 1894 - DNA, 37 bp, synthetic construct
  source 1..37: mol_type = other DNA
attgctccttacgaggagacccactttgtcagtgcgt

SEQ ID NO: 1895 - DNA, 37 bp, synthetic construct
  source 1..37: mol_type = other DNA
attgctccttacgaggagacctcaatgggatggaagg

SEQ ID NO: 1896 - DNA, 37 bp, synthetic construct
  source 1..37: mol_type = other DNA
attgctccttacgaggagacaggaatacatggtacac

SEQ ID NO: 1897 - DNA, 37 bp, synthetic construct
  source 1..37: mol_type = other DNA
attgctccttacgaggagacaagaacattttcagctt

SEQ ID NO: 1898 - DNA, 37 bp, synthetic construct
  source 1..37: mol_type = other DNA
attgctccttacgaggagacatccactttcattctgc

SEQ ID NO: 1899 - DNA, 37 bp, synthetic construct
  source 1..37: mol_type = other DNA
attgctccttacgaggagactttgttaaaggaggcaa

SEQ ID NO: 1900 - DNA, 37 bp, synthetic construct
  source 1..37: mol_type = other DNA
attgctccttacgaggagactccccagagtccatgtc

SEQ ID NO: 1901 - DNA, 37 bp, synthetic construct
  source 1..37: mol_type = other DNA
attgctccttacgaggagactcagtgcgtctgacatg

SEQ ID NO: 1902 - DNA, 37 bp, synthetic construct
  source 1..37: mol_type = other DNA
attgctccttacgaggagacgtcagtgcgtctgacat

SEQ ID NO: 1903 - DNA, 37 bp, synthetic construct; identical to SEQ ID NO: 1894
  source 1..37: mol_type = other DNA

SEQ ID NO: 1904 - DNA, 37 bp, synthetic construct
  source 1..37: mol_type = other DNA
attgctccttacgaggagactgttcccactttgtcag

SEQ ID NO: 1905 - DNA, 37 bp, synthetic construct; identical to SEQ ID NO: 1895
  source 1..37: mol_type = other DNA

SEQ ID NO: 1906 - DNA, 37 bp, synthetic construct
  source 1..37: mol_type = other DNA
attgctccttacgaggagaccatcccattgaggaata

SEQ ID NO: 1907 - DNA, 37 bp, synthetic construct; identical to SEQ ID NO: 1896
  source 1..37: mol_type = other DNA

SEQ ID NO: 1908 - DNA, 37 bp, synthetic construct
  source 1..37: mol_type = other DNA
attgctccttacgaggagacaacgtgtaccatgtatt

SEQ ID NO: 1909 - DNA, 37 bp, synthetic construct
  source 1..37: mol_type = other DNA
attgctccttacgaggagacttcaacgtgtaccatgt

SEQ ID NO: 1910 - DNA, 37 bp, synthetic construct; identical to SEQ ID NO: 1897
  source 1..37: mol_type = other DNA

SEQ ID NO: 1911 - DNA, 37 bp, synthetic construct
  source 1..37: mol_type = other DNA
attgctccttacgaggagacgagaagctgaaaatgtt

SEQ ID NO: 1912 - DNA, 37 bp, synthetic construct
  source 1..37: mol_type = other DNA
attgctccttacgaggagactcagcttctcgaacgca

SEQ ID NO: 1913 - DNA, 37 bp, synthetic construct
  source 1..37: mol_type = other DNA
attgctccttacgaggagaccagcttctcgaacgcag

SEQ ID NO: 1914 - DNA, 37 bp, synthetic construct
  source 1..37: mol_type = other DNA
attgctccttacgaggagactgcgttcgagaagctga

SEQ ID NO: 1915 - DNA, 37 bp, synthetic construct
  source 1..37: mol_type = other DNA
attgctccttacgaggagacagcttctcgaacgcaga

SEQ ID NO: 1916 - DNA, 37 bp, synthetic construct
  source 1..37: mol_type = other DNA
attgctccttacgaggagacattctgcgttcgagaag

SEQ ID NO: 1917 - DNA, 37 bp, synthetic construct
  source 1..37: mol_type = other DNA
attgctccttacgaggagaccattctgcgttcgagaa

SEQ ID NO: 1918 - DNA, 37 bp, synthetic construct
  source 1..37: mol_type = other DNA
attgctccttacgaggagactcgaacgcagaatgaaa

SEQ ID NO: 1919 - DNA, 37 bp, synthetic construct; identical to SEQ ID NO: 1898
  source 1..37: mol_type = other DNA

SEQ ID NO: 1920 - DNA, 37 bp, synthetic construct
  source 1..37: mol_type = other DNA
attgctccttacgaggagactatccactttcattctg

SEQ ID NO: 1921 - DNA, 37 bp, synthetic construct
  source 1..37: mol_type = other DNA
attgctccttacgaggagacttatccactttcattct

SEQ ID NO: 1922 - DNA, 37 bp, synthetic construct
  source 1..37: mol_type = other DNA
attgctccttacgaggagactttatccactttcattc

SEQ ID NO: 1923 - DNA, 37 bp, synthetic construct
  source 1..37: mol_type = other DNA
attgctccttacgaggagacttttatccactttcatt

SEQ ID NO: 1924 - DNA, 37 bp, synthetic construct
  source 1..37: mol_type = other DNA
attgctccttacgaggagacaacaaagaagggtcatc

SEQ ID NO: 1925 - DNA, 37 bp, synthetic construct
  source 1..37: mol_type = other DNA
attgctccttacgaggagaccctcctttaacaaagaa

SEQ ID NO: 1926 - DNA, 37 bp, synthetic construct
  source 1..37: mol_type = other DNA
attgctccttacgaggagacgcctcctttaacaaaga

SEQ ID NO: 1927 - DNA, 37 bp, synthetic construct; identical to SEQ ID NO: 1899
  source 1..37: mol_type = other DNA

SEQ ID NO: 1928 - DNA, 37 bp, synthetic construct
  source 1..37: mol_type = other DNA
attgctccttacgaggagacgttaaaggaggcaaaga

SEQ ID NO: 1929 - DNA, 37 bp, synthetic construct
  source 1..37: mol_type = other DNA
attgctccttacgaggagacttaaaggaggcaaagac

SEQ ID NO: 1930 - DNA, 37 bp, synthetic construct
  source 1..37: mol_type = other DNA
attgctccttacgaggagactctttgcctcctttaac

SEQ ID NO: 1931 - DNA, 37 bp, synthetic construct
  source 1..37: mol_type = other DNA
attgctccttacgaggagacgtctttgcctcctttaa

SEQ ID NO: 1932 - DNA, 37 bp, synthetic construct
  source 1..37: mol_type = other DNA
attgctccttacgaggagacgtctaacttactttgtc

SEQ ID NO: 1933 - DNA, 37 bp, synthetic construct
  source 1..37: mol_type = other DNA
attgctccttacgaggagacttggtctaacttacttt

SEQ ID NO: 1934 - DNA, 20 bp, synthetic construct
  source 1..20: mol_type = other DNA
agcaggctgttgtgtgacat

SEQ ID NO: 1935 - DNA, 20 bp, synthetic construct
  source 1..20: mol_type = other DNA
catgtcacacaacagcctgc

SEQ ID NO: 1936 - DNA, 20 bp, synthetic construct
  source 1..20: mol_type = other DNA
tgtgacatggaaggtgatga

SEQ ID NO: 1937 - DNA, 20 bp, synthetic construct
  source 1..20: mol_type = other DNA
atcaccttccatgtcacaca

SEQ ID NO: 1938 - DNA, 20 bp, synthetic construct
  source 1..20: mol_type = other DNA
gcataagcctccctggtctc

SEQ ID NO: 1939 - DNA, 20 bp, synthetic construct
  source 1..20: mol_type = other DNA
caggactcccagctggaggg

SEQ ID NO: 1940 - DNA, 20 bp, synthetic construct
  source 1..20: mol_type = other DNA
ctcaggccctccagctggga

SEQ ID NO: 1941 - DNA, 20 bp, synthetic construct
  source 1..20: mol_type = other DNA
tgctggcatctccatactct

SEQ ID NO: 1942 - DNA, 20 bp, synthetic construct
  source 1..20: mol_type = other DNA
tgcccaacttctgctggcat

SEQ ID NO: 1943 - DNA, 20 bp, synthetic construct
  source 1..20: mol_type = other DNA
ctgcccaacttctgctggca

SEQ ID NO: 1944 - DNA, 20 bp, synthetic construct
  source 1..20: mol_type = other DNA
tctgcccaacttctgctggc

SEQ ID NO: 1945 - DNA, 20 bp, synthetic construct
  source 1..20: mol_type = other DNA
tgacttttctgcccaacttc

SEQ ID NO: 1946 - DNA, 20 bp, synthetic construct
  source 1..20: mol_type = other DNA
ctgacttttctgcccaactt

SEQ ID NO: 1947 - DNA, 20 bp, synthetic construct
  source 1..20: mol_type = other DNA
tctgacttttctgcccaact

SEQ ID NO: 1948 - DNA, 20 bp, synthetic construct
  source 1..20: mol_type = other DNA
ccagaggagcttccggcaga

SEQ ID NO: 1949 - DNA, 20 bp, synthetic construct
  source 1..20: mol_type = other DNA
aggtctgccggaagctcctc

SEQ ID NO: 1950 - DNA, 20 bp, synthetic construct
  source 1..20: mol_type = other DNA
cggcagacctgaagcactgg

SEQ ID NO: 1951 - DNA, 20 bp, synthetic construct
  source 1..20: mol_type = other DNA
cagtgcttcaggtctgccgg

SEQ ID NO: 1952 - DNA, 20 bp, synthetic construct
  source 1..20: mol_type = other DNA
aacagcgcaggcagtggcag

SEQ ID NO: 1953 - DNA, 20 bp, synthetic construct
  source 1..20: mol_type = other DNA
aaccaggagccagcctccgg

SEQ ID NO: 1954 - DNA, 20 bp, synthetic construct
  source 1..20: mol_type = other DNA
tccaggcgcatctggccgga

SEQ ID NO: 1955 - DNA, 20 bp, synthetic construct
  source 1..20: mol_type = other DNA
ctccaggcgcatctggccgg

SEQ ID NO: 1956 - DNA, 20 bp, synthetic construct
  source 1..20: mol_type = other DNA
tctccaggcgcatctggccg

SEQ ID NO: 1957 - DNA, 20 bp, synthetic construct
  source 1..20: mol_type = other DNA
ctccagttcctcgttgagct

SEQ ID NO: 1958 - DNA, 20 bp, synthetic construct
  source 1..20: mol_type = other DNA
tccagttcctcgttgagctg

SEQ ID NO: 1959 - DNA, 20 bp, synthetic construct
  source 1..20: mol_type = other DNA
aggcagctcaacgaggaact

SEQ ID NO: 1960 - DNA, 20 bp, synthetic construct
  source 1..20: mol_type = other DNA
ctcgttgagctgcctgaatc

SEQ ID NO: 1961 - DNA, 20 bp, synthetic construct
  source 1..20: mol_type = other DNA
agctgcctgaatctccctga

SEQ ID NO: 1962 - DNA, 20 bp, synthetic construct
  source 1..20: mol_type = other DNA
gtccccaccatctccactct

SEQ ID NO: 1963 - DNA, 20 bp, synthetic construct
  source 1..20: mol_type = other DNA
tccccaccatctccactctg

SEQ ID NO: 1964 - DNA, 20 bp, synthetic construct
  source 1..20: mol_type = other DNA
ccagagcccatggggcagag

SEQ ID NO: 1965 - DNA, 20 bp, synthetic construct
  source 1..20: mol_type = other DNA
gccagagcccatggggcaga

SEQ ID NO: 1966 - DNA, 20 bp, synthetic construct
  source 1..20: mol_type = other DNA
cagcctcagagatttgccag

SEQ ID NO: 1967 - DNA, 20 bp, synthetic construct
  source 1..20: mol_type = other DNA
ggaggccgtggacagtgaat

SEQ ID NO: 1968 - DNA, 20 bp, synthetic construct
  source 1..20: mol_type = other DNA
actgtccacggcctcccaac

SEQ ID NO: 1969 - DNA, 20 bp, synthetic construct
  source 1..20: mol_type = other DNA
gctccatcagccactgacct

SEQ ID NO: 1970 - DNA, 20 bp, synthetic construct
  source 1..20: mol_type = other DNA
aggcatgctgggcaggtcag

SEQ ID NO: 1971 - DNA, 20 bp, synthetic construct
  source 1..20: mol_type = other DNA
ctcgggaggtcagggcaggt

SEQ ID NO: 1972 - DNA, 20 bp, synthetic construct
  source 1..20: mol_type = other DNA
gctcgggaggtcagggcagg

SEQ ID NO: 1973 - DNA, 20 bp, synthetic construct
  source 1..20: mol_type = other DNA
gagacctctccagctgccgg

SEQ ID NO: 1974 - DNA, 20 bp, synthetic construct
  source 1..20: mol_type = other DNA
ttggagacctctccagctgc

SEQ ID NO: 1975 - DNA, 20 bp, synthetic construct
  source 1..20: mol_type = other DNA
gaagcttgttggagacctct

SEQ ID NO: 1976 - DNA, 20 bp, synthetic construct
  source 1..20: mol_type = other DNA
ggaagcttgttggagacctc

SEQ ID NO: 1977 - DNA, 20 bp, synthetic construct
  source 1..20: mol_type = other DNA
tggaagcttgttggagacct

SEQ ID NO: 1978 - DNA, 20 bp, synthetic construct
  source 1..20: mol_type = other DNA
taccgctcactgcaggacac

SEQ ID NO: 1979 - DNA, 20 bp, synthetic construct
  source 1..20: mol_type = other DNA
ctgctgctcctctccagcct

SEQ ID NO: 1980 - DNA, 20 bp, synthetic construct
  source 1..20: mol_type = other DNA
ccgctccaggctcttgctgc

SEQ ID NO: 1981 - DNA, 20 bp, synthetic construct
  source 1..20: mol_type = other DNA
tgcccagtccggggtggcca

SEQ ID NO: 1982 - DNA, 20 bp, synthetic construct
  source 1..20: mol_type = other DNA
ggccagctgccgttctgccc

SEQ ID NO: 1983 - DNA, 20 bp, synthetic construct
  source 1..20: mol_type = other DNA
gcagccaacagcacctcagc

SEQ ID NO: 1984 - DNA, 20 bp, synthetic construct
  source 1..20: mol_type = other DNA
gctgccaaggagcaccggcg

SEQ ID NO: 1985 - DNA, 20 bp, synthetic construct
  source 1..20: mol_type = other DNA
cccagcacagcaatcactcg

SEQ ID NO: 1986 - DNA, 20 bp, synthetic construct
  source 1..20: mol_type = other DNA
gcccagcacagcaatcactc

SEQ ID NO: 1987 - DNA, 20 bp, synthetic construct
  source 1..20: mol_type = other DNA
ctgtgctgggcaaagctggt

SEQ ID NO: 1988 - DNA, 20 bp, synthetic construct
  source 1..20: mol_type = other DNA
ccctgaccagctttgcccag

SEQ ID NO: 1989 - DNA, 20 bp, synthetic construct
  source 1..20: mol_type = other DNA
ggctggggcagtgagccggg

SEQ ID NO: 1990 - DNA, 20 bp, synthetic construct
  source 1..20: mol_type = other DNA
tggccggcttccccagtacg

SEQ ID NO: 1991 - DNA, 20 bp, synthetic construct
  source 1..20: mol_type = other DNA
cccagtacgactttgtcttc

SEQ ID NO: 1992 - DNA, 20 bp, synthetic construct
  source 1..20: mol_type = other DNA
gtcttctctgtcccctgcca

SEQ ID NO: 1993 - DNA, 20 bp, synthetic construct
  source 1..20: mol_type = other DNA
tcttctctgtcccctgccat

SEQ ID NO: 1994 - DNA, 20 bp, synthetic construct
  source 1..20: mol_type = other DNA
tctgtcccctgccattgctt

SEQ ID NO: 1995 - DNA, 20 bp, synthetic construct
  source 1..20: mol_type = other DNA
aagcaatggcaggggacaga

SEQ ID NO: 1996 - DNA, 20 bp, synthetic construct
  source 1..20: mol_type = other DNA
cttgaaccgtccgggggatg

SEQ ID NO: 1997 - DNA, 20 bp, synthetic construct
  source 1..20: mol_type = other DNA
aaccgtccgggggatgccta

SEQ ID NO: 1998 - DNA, 20 bp, synthetic construct
  source 1..20: mol_type = other DNA
tccctgggcccacagccact

SEQ ID NO: 1999 - DNA, 20 bp, synthetic construct
  source 1..20: mol_type = other DNA
aagatgtggctgaaaacctc

SEQ ID NO: 2000 - DNA, 20 bp, synthetic construct
  source 1..20: mol_type = other DNA
tcagccacatcttgaagaga

SEQ ID NO: 2001 - DNA, 20 bp, synthetic construct
  source 1..20: mol_type = other DNA
cagccacatcttgaagagac

SEQ ID NO: 2002 - DNA, 20 bp, synthetic construct
  source 1..20: mol_type = other DNA
agccacatcttgaagagacc

SEQ ID NO: 2003 - DNA, 20 bp, synthetic construct
  source 1..20: mol_type = other DNA
aagagacctgaccgcgttct

SEQ ID NO: 2004 - DNA, 20 bp, synthetic construct
  source 1..20: mol_type = other DNA
tgctcatcctagacggcttc

SEQ ID NO: 2005 - DNA, 20 bp, synthetic construct
  source 1..20: mol_type = other DNA
cagctcctcgaagccgtcta

SEQ ID NO: 2006 - DNA, 20 bp, synthetic construct
  source 1..20: mol_type = other DNA
cgcttccagctcctcgaagc

SEQ ID NO: 2007 - DNA, 20 bp, synthetic construct
  source 1..20: mol_type = other DNA
gaggagctggaagcgcaaga

SEQ ID NO: 2008 - DNA, 20 bp, synthetic construct
  source 1..20: mol_type = other DNA
ctgcacagcacgtgcggacc

SEQ ID NO: 2009 - DNA, 20 bp, synthetic construct
  source 1..20: mol_type = other DNA
tggaaaaggccggccagcag

SEQ ID NO: 2010 - DNA, 20 bp, synthetic construct
  source 1..20: mol_type = other DNA
ttctggaaaaggccggccag

SEQ ID NO: 2011 - DNA, 20 bp, synthetic construct
  source 1..20: mol_type = other DNA
tccagaagaagctgctccga

SEQ ID NO: 2012 - DNA, 20 bp, synthetic construct
  source 1..20: mol_type = other DNA
ccagaagaagctgctccgag

SEQ ID NO: 2013 - DNA, 20 bp, synthetic construct
  source 1..20: mol_type = other DNA
cagaagaagctgctccgagg

SEQ ID NO: 2014 - DNA, 20 bp, synthetic construct
  source 1..20: mol_type = other DNA
caccctcctcctcacagccc

SEQ ID NO: 2015 - DNA, 20 bp, synthetic construct
  source 1..20: mol_type = other DNA
ctcaggctctggaccaggcg

SEQ ID NO: 2016 - DNA, 20 bp, synthetic construct
  source 1..20: mol_type = other DNA
gagctgtccggcttctccat

SEQ ID NO: 2017 - DNA, 20 bp, synthetic construct
  source 1..20: mol_type = other DNA
agctgtccggcttctccatg

SEQ ID NO: 2018 - DNA, 20 bp, synthetic construct
  source 1..20: mol_type = other DNA
tccatggagcaggcccaggc

SEQ ID NO: 2019 - DNA, 20 bp, synthetic construct
  source 1..20: mol_type = other DNA
gagagctcagggatgacaga

SEQ ID NO: 2020 - DNA, 20 bp, synthetic construct
  source 1..20: mol_type = other DNA
agagctcagggatgacagag

SEQ ID NO: 2021 - DNA, 20 bp, synthetic construct
  source 1..20: mol_type = other DNA
gtgctctgtcatccctgagc

SEQ ID NO: 2022 - DNA, 20 bp, synthetic construct
  source 1..20: mol_type = other DNA
ttctcagtcacagccacagc

SEQ ID NO: 2023 - DNA, 20 bp, synthetic construct
  source 1..20: mol_type = other DNA
tcagtcacagccacagccct

SEQ ID NO: 2024 - DNA, 20 bp, synthetic construct
  source 1..20: mol_type = other DNA
gtgccgggcagtgtgccagc

SEQ ID NO: 2025 - DNA, 20 bp, synthetic construct
  source 1..20: mol_type = other DNA
tgccgggcagtgtgccagct

SEQ ID NO: 2026 - DNA, 20 bp, synthetic construct
  source 1..20: mol_type = other DNA
gcgtcctccccaagctccag

SEQ ID NO: 2027 - DNA, 20 bp, synthetic construct
  source 1..20: mol_type = other DNA
gggaggacgccaagctgccc

SEQ ID NO: 2028 - DNA, 20 bp, synthetic construct
  source 1..20: mol_type = other DNA
gccagctctgccagggcccc

SEQ ID NO: 2029 - DNA, 20 bp, synthetic construct
  source 1..20: mol_type = other DNA
atgtctgcggcccagctccc

SEQ ID NO: 2030 - DNA, 20 bp, synthetic construct
  source 1..20: mol_type = other DNA
gatgtctgcggcccagctcc

SEQ ID NO: 2031 - DNA, 20 bp, synthetic construct
  source 1..20: mol_type = other DNA
ccatccgcagacgtgaggac

SEQ ID NO: 2032 - DNA, 20 bp, synthetic construct
  source 1..20: mol_type = other DNA
gccatcgcccaggtcctcac

SEQ ID NO: 2033 - DNA, 20 bp, synthetic construct
  source 1..20: mol_type = other DNA
ggccatcgcccaggtcctca

SEQ ID NO: 2034 - DNA, 20 bp, synthetic construct
  source 1..20: mol_type = other DNA
gactaagcctttggccatcg

SEQ ID NO: 2035 - DNA, 20 bp, synthetic construct
  source 1..20: mol_type = other DNA
gtccaacacccaccgcgggc

SEQ ID NO: 2036 - DNA, 20 bp, synthetic construct
  source 1..20: mol_type = other DNA
caggaggaagctggggaagg

SEQ ID NO: 2037 - DNA, 20 bp, synthetic construct
  source 1..20: mol_type = other DNA
cccagcttcctcctgcaatg

SEQ ID NO: 2038 - DNA, 20 bp, synthetic construct
  source 1..20: mol_type = other DNA
ctcctgcaatgcttcctggg

SEQ ID NO: 2039 - DNA, 20 bp, synthetic construct
  source 1..20: mol_type = other DNA
ctgggggccctgtggctggc

SEQ ID NO: 2040 - DNA, 20 bp, synthetic construct
  source 1..20: mol_type = other DNA
gccactcagagccagccaca

SEQ ID NO: 2041 - DNA, 20 bp, synthetic construct
  source 1..20: mol_type = other DNA
cgccactcagagccagccac

SEQ ID NO: 2042 - DNA, 20 bp, synthetic construct
  source 1..20: mol_type = other DNA
atttcgccactcagagccag

SEQ ID NO: 2043 - DNA, 20 bp, synthetic construct
  source 1..20: mol_type = other DNA
tccttgatttcgccactcag

SEQ ID NO: 2044 - DNA, 20 bp, synthetic construct
  source 1..20: mol_type = other DNA
gggtcaatgctaggtactgc

SEQ ID NO: 2045 - DNA, 20 bp, synthetic construct
  source 1..20: mol_type = other DNA
cttggggtcaatgctaggta

SEQ ID NO: 2046 - DNA, 20 bp, synthetic construct
  source 1..20: mol_type = other DNA
ttccttggggtcaatgctag

SEQ ID NO: 2047 - DNA, 20 bp, synthetic construct
  source 1..20: mol_type = other DNA
accccaaggaagaagaggcc

SEQ ID NO: 2048 - DNA, 20 bp, synthetic construct
  source 1..20: mol_type = other DNA
tcatagggcctcttcttcct

SEQ ID NO: 2049 - DNA, 20 bp, synthetic construct
  source 1..20: mol_type = other DNA
ctggctgggctgatcttcca

SEQ ID NO: 2050 - DNA, 20 bp, synthetic construct
  source 1..20: mol_type = other DNA
tggctgggctgatcttccag

SEQ ID NO: 2051 - DNA, 20 bp, synthetic construct
  source 1..20: mol_type = other DNA
cagcctcccgcccgctgcct

SEQ ID NO: 2052 - DNA, 20 bp, synthetic construct
  source 1..20: mol_type = other DNA
ctgtccaccgaggcagccgc

SEQ ID NO: 2053 - DNA, 20 bp, synthetic construct
  source 1..20: mol_type = other DNA
tgcttcctgtccaccgaggc

SEQ ID NO: 2054 - DNA, 20 bp, synthetic construct
  source 1..20: mol_type = other DNA
aggtacctcgcaagcacctt

SEQ ID NO: 2055 - DNA, 20 bp, synthetic construct
  source 1..20: mol_type = other DNA
cgaggtacctgaagcggctg

SEQ ID NO: 2056 - DNA, 20 bp, synthetic construct
  source 1..20: mol_type = other DNA
cagcctcctcggcctcgtgg

SEQ ID NO: 2057 - DNA, 20 bp, synthetic construct
  source 1..20: mol_type = other DNA
ggcagcacgtggtacaggag

SEQ ID NO: 2058 - DNA, 20 bp, synthetic construct
  source 1..20: mol_type = other DNA
gcagcacgtggtacaggagc

SEQ ID NO: 2059 - DNA, 20 bp, synthetic construct
  source 1..20: mol_type = other DNA
tctgggcacccgcctcacgc

SEQ ID NO: 2060 - DNA, 20 bp, synthetic construct
  source 1..20: mol_type = other DNA
ctgggcacccgcctcacgcc

SEQ ID NO: 2061 - DNA, 20 bp, synthetic construct
  source 1..20: mol_type = other DNA
tgggcacccgcctcacgcct

SEQ ID NO: 2062 - DNA, 20 bp, synthetic construct
  source 1..20: mol_type = other DNA
cccagtacatgtgcatcagg

SEQ ID NO: 2063 - DNA, 20 bp, synthetic construct
  source 1..20: mol_type = other DNA
gcccgccgcctccaaggcct

SEQ ID NO: 2064 - DNA, 20 bp, synthetic construct
  source 1..20: mol_type = other DNA
gaggcggcgggccaagactt

SEQ ID NO: 2065 - DNA, 20 bp, synthetic construct
  source 1..20: mol_type = other DNA
tccctggacctccgcagcac

SEQ ID NO: 2066 - DNA, 20 bp, synthetic construct
  source 1..20: mol_type = other DNA
gcccctctggattggggagc

SEQ ID NO: 2067 - DNA, 20 bp, synthetic construct
  source 1..20: mol_type = other DNA
cccctctggattggggagcc

SEQ ID NO: 2068 - DNA, 20 bp, synthetic construct
  source 1..20: mol_type = other DNA
gggagcctcgtgggactcag

SEQ ID NO: 2069 - DNA, 20 bp, synthetic construct
  source 1..20: mol_type = other DNA
gtctccccatgctgctgcag

SEQ ID NO: 2070 - DNA, 20 bp, synthetic construct
  source 1..20: mol_type = other DNA
tcctctgctgcctgaagtag

SEQ ID NO: 2071 - DNA, 20 bp, synthetic construct
  source 1..20: mol_type = other DNA
aggcagcagaggagaagttc

SEQ ID NO: 2072 - DNA, 20 bp, synthetic construct
  source 1..20: mol_type = other DNA
aaaggctcgatggtgaactt

SEQ ID NO: 2073 - DNA, 20 bp, synthetic construct
  source 1..20: mol_type = other DNA
gaaaggctcgatggtgaact

SEQ ID NO: 2074 - DNA, 20 bp, synthetic construct
  source 1..20: mol_type = other DNA
accatcgagcctttcaaagc

SEQ ID NO: 2075 - DNA, 20 bp, synthetic construct
  source 1..20: mol_type = other DNA
gctttgaaaggctcgatggt

SEQ ID NO: 2076 - DNA, 20 bp, synthetic construct
  source 1..20: mol_type = other DNA
agggacttggctttgaaagg

SEQ ID NO: 2077 - DNA, 20 bp, synthetic construct
  source 1..20: mol_type = other DNA
caaagccaagtccctgaagg

SEQ ID NO: 2078 - DNA, 20 bp, synthetic construct
  source 1..20: mol_type = other DNA
aaagccaagtccctgaagga

SEQ ID NO: 2079 - DNA, 20 bp, synthetic construct
  source 1..20: mol_type = other DNA
cacatccttcagggacttgg

SEQ ID NO: 2080 - DNA, 20 bp, synthetic construct
  source 1..20: mol_type = other DNA
ccaggtcttccacatccttc

SEQ ID NO: 2081 - DNA, 20 bp, synthetic construct
  source 1..20: mol_type = other DNA
cccaggtcttccacatcctt

SEQ ID NO: 2082 - DNA, 20 bp, synthetic construct
  source 1..20: mol_type = other DNA
ctcggaagacacagctgggg

SEQ ID NO: 2083 - DNA, 20 bp, synthetic construct
  source 1..20: mol_type = other DNA
ggtcccgaacagcagggagc

SEQ ID NO: 2084 - DNA, 20 bp, synthetic construct
  source 1..20: mol_type = other DNA
aggtcccgaacagcagggag

SEQ ID NO: 2085 - DNA, 20 bp, synthetic construct
  source 1..20: mol_type = other DNA
tttaggtcccgaacagcagg

SEQ ID NO: 2086 - DNA, 20 bp, synthetic construct
  source 1..20: mol_type = other DNA
ctttaggtcccgaacagcag

SEQ ID NO: 2087 - DNA, 20 bp, synthetic construct
  source 1..20: mol_type = other DNA
gggacctaaagaaactggag

SEQ ID NO: 2088 - DNA, 20 bp, synthetic construct
  source 1..20: mol_type = other DNA
gggaaagcctgggggcctga

SEQ ID NO: 2089 - DNA, 20 bp, synthetic construct
  source 1..20: mol_type = other DNA
ggggaaagcctgggggcctg

SEQ ID NO: 2090 - DNA, 20 bp, synthetic construct
  source 1..20: mol_type = other DNA
ccccaaactggtgcggatcc

SEQ ID NO: 2091 - DNA, 20 bp, synthetic construct
  source 1..20: mol_type = other DNA
cccaaactggtgcggatcct

SEQ ID NO: 2092 - DNA, 20 bp, synthetic construct
  source 1..20: mol_type = other DNA
ttctcactcagcgcatccag

SEQ ID NO: 2093 - DNA, 20 bp, synthetic construct
  source 1..20: mol_type = other DNA
agctgggggaaggtggctga

SEQ ID NO: 2094 - DNA, 20 bp, synthetic construct
  source 1..20: mol_type = other DNA
ccccagctgaagtccttgga

SEQ ID NO: 2095 - DNA, 20 bp, synthetic construct
  source 1..20: mol_type = other DNA
caaggacttcagctggggga

SEQ ID NO: 2096 - DNA, 20 bp, synthetic construct
  source 1..20: mol_type = other DNA
ccaaggacttcagctggggg

SEQ ID NO: 2097 - DNA, 20 bp, synthetic construct
  source 1..20: mol_type = other DNA
agggtttccaaggacttcag

SEQ ID NO: 2098 - DNA, 20 bp, synthetic construct
  source 1..20: mol_type = other DNA
taggcacccaggtcagtgat

SEQ ID NO: 2099 - DNA, 20 bp, synthetic construct
  source 1..20: mol_type = other DNA
gtaggcacccaggtcagtga

SEQ ID NO: 2100 - DNA, 20 bp, synthetic construct
  source 1..20: mol_type = other DNA
gctcgctgcatccctgctca

SEQ ID NO: 2101 - DNA, 20 bp, synthetic construct
  source 1..20: mol_type = other DNA
gcctgagcagggatgcagcg

SEQ ID NO: 2102 - DNA, 20 bp, synthetic construct
  source 1..20: mol_type = other DNA
tacaataactgcatctgcga

SEQ ID NO: 2103 - DNA, 20 bp, synthetic construct
  source 1..20: mol_type = other DNA
gctcgtgtgcttccggacat

SEQ ID NO: 2104 - DNA, 20 bp, synthetic construct
  source 1..20: mol_type = other DNA
cggacatggtgtccctccgg

SEQ ID NO: 2105 - DNA, 20 bp, synthetic construct
  source 1..20: mol_type = other DNA
acggctgccggggcccagca

SEQ ID NO: 2106 - DNA, 20 bp, synthetic construct
  source 1..20: mol_type = other DNA
ggaggtgtcctcatgtggag

SEQ ID NO: 2107 - DNA, 20 bp, synthetic construct
  source 1..20: mol_type = other DNA
ctggacactgaatgggatgg

SEQ ID NO: 2108 - DNA, 20 bp, synthetic construct
  source 1..20: mol_type = other DNA
agtgtccaggaacacctgca

SEQ ID NO: 2109 - DNA, 20 bp, synthetic construct
  source 1..20: mol_type = other DNA
caggtgttcctggacactga

SEQ ID NO: 2110 - DNA, 20 bp, synthetic construct
  source 1..20: mol_type = other DNA
ttgcaggtgttcctggacac

SEQ ID NO: 2111 - DNA, 20 bp, synthetic construct
  source 1..20: mol_type = other DNA
acggatcagcctgagatgat

SEQ ID NO: 2112 - RNA, 56 nt, synthetic construct
  source 1..56: mol_type = other RNA
ctttcaagactaatagattgctccttacgaggagacagcaggctgttgtgtgacat

SEQ ID NO: 2113 - RNA, 56 nt, synthetic construct
  source 1..56: mol_type = other RNA
ctttcaagactaatagattgctccttacgaggagaccatgtcacacaacagcctgc

SEQ ID NO: 2114 - RNA, 56 nt, synthetic construct
  source 1..56: mol_type = other RNA
ctttcaagactaatagattgctccttacgaggagactgtgacatggaaggtgatga

SEQ ID NO: 2115 - RNA, 56 nt, synthetic construct
  source 1..56: mol_type = other RNA
ctttcaagactaatagattgctccttacgaggagacatcaccttccatgtcacaca

SEQ ID NO: 2116 - RNA, 56 nt, synthetic construct
  source 1..56: mol_type = other RNA
ctttcaagactaatagattgctccttacgaggagacgcataagcctccctggtctc

SEQ ID NO: 2117 - RNA, 56 nt, synthetic construct
  source 1..56: mol_type = other RNA
ctttcaagactaatagattgctccttacgaggagaccaggactcccagctggaggg

SEQ ID NO: 2118 - RNA, 56 nt, synthetic construct
  source 1..56: mol_type = other RNA
ctttcaagactaatagattgctccttacgaggagacctcaggccctccagctggga

SEQ ID NO: 2119 - RNA, 56 nt, synthetic construct
  source 1..56: mol_type = other RNA
ctttcaagactaatagattgctccttacgaggagactgctggcatctccatactct

SEQ ID NO: 2120 - RNA, 56 nt, synthetic construct
  source 1..56: mol_type = other RNA
ctttcaagactaatagattgctccttacgaggagactgcccaacttctgctggcat

SEQ ID NO: 2121 - RNA, 56 nt, synthetic construct
  source 1..56: mol_type = other RNA
ctttcaagactaatagattgctccttacgaggagacctgcccaacttctgctggca

SEQ ID NO: 2122 - RNA, 56 nt, synthetic construct
  source 1..56: mol_type = other RNA
ctttcaagactaatagattgctccttacgaggagactctgcccaacttctgctggc

SEQ ID NO: 2123 - RNA, 56 nt, synthetic construct
  source 1..56: mol_type = other RNA
ctttcaagactaatagattgctccttacgaggagactgacttttctgcccaacttc

SEQ ID NO: 2124 - RNA, 56 nt, synthetic construct
  source 1..56: mol_type = other RNA
ctttcaagactaatagattgctccttacgaggagacctgacttttctgcccaactt

SEQ ID NO: 2125 - RNA, 56 nt, synthetic construct
  source 1..56: mol_type = other RNA
ctttcaagactaatagattgctccttacgaggagactctgacttttctgcccaact

SEQ ID NO: 2126 - RNA, 56 nt, synthetic construct
  source 1..56: mol_type = other RNA
ctttcaagactaatagattgctccttacgaggagacccagaggagcttccggcaga

SEQ ID NO: 2127 - RNA, 56 nt, synthetic construct
  source 1..56: mol_type = other RNA
ctttcaagactaatagattgctccttacgaggagacaggtctgccggaagctcctc

SEQ ID NO: 2128 - RNA, 56 nt, synthetic construct
  source 1..56: mol_type = other RNA
ctttcaagactaatagattgctccttacgaggagaccggcagacctgaagcactgg

SEQ ID NO: 2129 - RNA, 56 nt, synthetic construct
  source 1..56: mol_type = other RNA
ctttcaagactaatagattgctccttacgaggagaccagtgcttcaggtctgccgg

SEQ ID NO: 2130 - RNA, 56 nt, synthetic construct
  source 1..56: mol_type = other RNA
ctttcaagactaatagattgctccttacgaggagacaacagcgcaggcagtggcag

SEQ ID NO: 2131 - RNA, 56 nt, synthetic construct
  source 1..56: mol_type = other RNA
ctttcaagactaatagattgctccttacgaggagacaaccaggagccagcctccgg

SEQ ID NO: 2132 - RNA, 56 nt, synthetic construct
  source 1..56: mol_type = other RNA
ctttcaagactaatagattgctccttacgaggagactccaggcgcatctggccgga

SEQ ID NO: 2133 - RNA, 56 nt, synthetic construct
  source 1..56: mol_type = other RNA
ctttcaagactaatagattgctccttacgaggagacctccaggcgcatctggccgg

SEQ ID NO: 2134 - RNA, 56 nt, synthetic construct
  source 1..56: mol_type = other RNA
ctttcaagactaatagattgctccttacgaggagactctccaggcgcatctggccg

SEQ ID NO: 2135 - RNA, 56 nt, synthetic construct
  source 1..56: mol_type = other RNA
ctttcaagactaatagattgctccttacgaggagacctccagttcctcgttgagct

SEQ ID NO: 2136 - RNA, 56 nt, synthetic construct
  source 1..56: mol_type = other RNA
ctttcaagactaatagattgctccttacgaggagactccagttcctcgttgagctg

SEQ ID NO: 2137 - RNA, 56 nt, synthetic construct
  source 1..56: mol_type = other RNA
ctttcaagactaatagattgctccttacgaggagacaggcagctcaacgaggaact

SEQ ID NO: 2138 - RNA, 56 nt, synthetic construct
  source 1..56: mol_type = other RNA
ctttcaagactaatagattgctccttacgaggagacctcgttgagctgcctgaatc

SEQ ID NO: 2139 - RNA, 56 nt, synthetic construct
  source 1..56: mol_type = other RNA
ctttcaagactaatagattgctccttacgaggagacagctgcctgaatctccctga

SEQ ID NO: 2140 - RNA, 56 nt, synthetic construct
  source 1..56: mol_type = other RNA
ctttcaagactaatagattgctccttacgaggagacgtccccaccatctccactct

SEQ ID NO: 2141 - RNA, 56 nt, synthetic construct
  source 1..56: mol_type = other RNA
ctttcaagactaatagattgctccttacgaggagactccccaccatctccactctg

SEQ ID NO: 2142 - RNA, 56 nt, synthetic construct
  source 1..56: mol_type = other RNA
ctttcaagactaatagattgctccttacgaggagacccagagcccatggggcagag

SEQ ID NO: 2143 - RNA, 56 nt, synthetic construct
  source 1..56: mol_type = other RNA
ctttcaagactaatagattgctccttacgaggagacgccagagcccatggggcaga

SEQ ID NO: 2144 - RNA, 56 nt, synthetic construct
  source 1..56: mol_type = other RNA
ctttcaagactaatagattgctccttacgaggagaccagcctcagagatttgccag

SEQ ID NO: 2145 - RNA, 56 nt, synthetic construct
  source 1..56: mol_type = other RNA
ctttcaagactaatagattgctccttacgaggagacggaggccgtggacagtgaat

SEQ ID NO: 2146 - RNA, 56 nt, synthetic construct
  source 1..56: mol_type = other RNA
ctttcaagactaatagattgctccttacgaggagacactgtccacggcctcccaac

SEQ ID NO: 2147 - RNA, 56 nt, synthetic construct
  source 1..56: mol_type = other RNA
ctttcaagactaatagattgctccttacgaggagacgctccatcagccactgacct

SEQ ID NO: 2148 - RNA, 56 nt, synthetic construct
  source 1..56: mol_type = other RNA
ctttcaagactaatagattgctccttacgaggagacaggcatgctgggcaggtcag

SEQ ID NO: 2149 - RNA, 56 nt, synthetic construct
  source 1..56: mol_type = other RNA
ctttcaagactaatagattgctccttacgaggagacctcgggaggtcagggcaggt

SEQ ID NO: 2150 - RNA, 56 nt, synthetic construct
  source 1..56: mol_type = other RNA
ctttcaagactaatagattgctccttacgaggagacgctcgggaggtcagggcagg

SEQ ID NO: 2151 - RNA, 56 nt, synthetic construct
  source 1..56: mol_type = other RNA
ctttcaagactaatagattgctccttacgaggagacgagacctctccagctgccgg

SEQ ID NO: 2152 - RNA, 56 nt, synthetic construct
  source 1..56: mol_type = other RNA
ctttcaagactaatagattgctccttacgaggagacttggagacctctccagctgc

SEQ ID NO: 2153 - RNA, 56 nt, synthetic construct
  source 1..56: mol_type = other RNA
ctttcaagactaatagattgctccttacgaggagacgaagcttgttggagacctct

SEQ ID NO: 2154 - RNA, 56 nt, synthetic construct
  source 1..56: mol_type = other RNA
ctttcaagactaatagattgctccttacgaggagacggaagcttgttggagacctc

SEQ ID NO: 2155 - RNA, 56 nt, synthetic construct
  source 1..56: mol_type = other RNA
ctttcaagactaatagattgctccttacgaggagactggaagcttgttggagacct

SEQ ID NO: 2156 - RNA, 56 nt, synthetic construct
  source 1..56: mol_type = other RNA
ctttcaagactaatagattgctccttacgaggagactaccgctcactgcaggacac

SEQ ID NO: 2157 - RNA, 56 nt, synthetic construct
  source 1..56: mol_type = other RNA
ctttcaagactaatagattgctccttacgaggagacctgctgctcctctccagcct

SEQ ID NO: 2158 - RNA, 56 nt, synthetic construct
  source 1..56: mol_type = other RNA
ctttcaagactaatagattgctccttacgaggagacccgctccaggctcttgctgc

SEQ ID NO: 2159 - RNA, 56 nt, synthetic construct
  source 1..56: mol_type = other RNA
ctttcaagactaatagattgctccttacgaggagactgcccagtccggggtggcca

SEQ ID NO: 2160 - RNA, 56 nt, synthetic construct
  source 1..56: mol_type = other RNA
ctttcaagactaatagattgctccttacgaggagacggccagctgccgttctgccc

SEQ ID NO: 2161 - RNA, 56 nt, synthetic construct
  source 1..56: mol_type = other RNA
ctttcaagactaatagattgctccttacgaggagacgcagccaacagcacctcagc

SEQ ID NO: 2162 - RNA, 56 nt, synthetic construct
  source 1..56: mol_type = other RNA
ctttcaagactaatagattgctccttacgaggagacgctgccaaggagcaccggcg

SEQ ID NO: 2163 - RNA, 56 nt, synthetic construct
  source 1..56: mol_type = other RNA
ctttcaagactaatagattgctccttacgaggagaccccagcacagcaatcactcg

SEQ ID NO: 2164 - RNA, 56 nt, synthetic construct
  source 1..56: mol_type = other RNA
ctttcaagactaatagattgctccttacgaggagacgcccagcacagcaatcactc

SEQ ID NO: 2165 - RNA, 56 nt, synthetic construct
  source 1..56: mol_type = other RNA
ctttcaagactaatagattgctccttacgaggagacctgtgctgggcaaagctggt

SEQ ID NO: 2166 - RNA, 56 nt, synthetic construct
  source 1..56: mol_type = other RNA
ctttcaagactaatagattgctccttacgaggagacccctgaccagctttgcccag

SEQ ID NO: 2167 - RNA, 56 nt, synthetic construct
  source 1..56: mol_type = other RNA
ctttcaagactaatagattgctccttacgaggagacggctggggcagtgagccggg

SEQ ID NO: 2168 - RNA, 56 nt, synthetic construct
  source 1..56: mol_type = other RNA
ctttcaagactaatagattgctccttacgaggagactggccggcttccccagtacg

SEQ ID NO: 2169 - RNA, 56 nt, synthetic construct
  source 1..56: mol_type = other RNA
ctttcaagactaatagattgctccttacgaggagaccccagtacgactttgtcttc

SEQ ID NO: 2170 - RNA, 56 nt, synthetic construct
  source 1..56: mol_type = other RNA
ctttcaagactaatagattgctccttacgaggagacgtcttctctgtcccctgcca

SEQ ID NO: 2171 - RNA, 56 nt, synthetic construct
  source 1..56: mol_type = other RNA
ctttcaagactaatagattgctccttacgaggagactcttctctgtcccctgccat

SEQ ID NO: 2172 - RNA, 56 nt, synthetic construct
  source 1..56: mol_type = other RNA
ctttcaagactaatagattgctccttacgaggagactctgtcccctgccattgctt

SEQ ID NO: 2173 - RNA, 56 nt, synthetic construct
  source 1..56: mol_type = other RNA
ctttcaagactaatagattgctccttacgaggagacaagcaatggcaggggacaga

SEQ ID NO: 2174 - RNA, 56 nt, synthetic construct
  source 1..56: mol_type = other RNA
ctttcaagactaatagattgctccttacgaggagaccttgaaccgtccgggggatg

SEQ ID NO: 2175 - RNA, 56 nt, synthetic construct
  source 1..56: mol_type = other RNA
ctttcaagactaatagattgctccttacgaggagacaaccgtccgggggatgccta

SEQ ID NO: 2176 - RNA, 56 nt, synthetic construct
  source 1..56: mol_type = other RNA
ctttcaagactaatagattgctccttacgaggagactccctgggcccacagccact

SEQ ID NO: 2177 - RNA, 56 nt, synthetic construct
  source 1..56: mol_type = other RNA
ctttcaagactaatagattgctccttacgaggagacaagatgtggctgaaaacctc

SEQ ID NO: 2178 - RNA, 56 nt, synthetic construct
  source 1..56: mol_type = other RNA
ctttcaagactaatagattgctccttacgaggagactcagccacatcttgaagaga

SEQ ID NO: 2179 - RNA, 56 nt, synthetic construct
  source 1..56: mol_type = other RNA
ctttcaagactaatagattgctccttacgaggagaccagccacatcttgaagagac

SEQ ID NO: 2180 - RNA, 56 nt, synthetic construct
  source 1..56: mol_type = other RNA
ctttcaagactaatagattgctccttacgaggagacagccacatcttgaagagacc

SEQ ID NO: 2181 - RNA, 56 nt, synthetic construct
  source 1..56: mol_type = other RNA
ctttcaagactaatagattgctccttacgaggagacaagagacctgaccgcgttct

SEQ ID NO: 2182 - RNA, 56 nt, synthetic construct
  source 1..56: mol_type = other RNA
ctttcaagactaatagattgctccttacgaggagactgctcatcctagacggcttc

SEQ ID NO: 2183 - RNA, 56 nt, synthetic construct
  source 1..56: mol_type = other RNA
ctttcaagactaatagattgctccttacgaggagaccagctcctcgaagccgtcta

SEQ ID NO: 2184 - RNA, 56 nt, synthetic construct
  source 1..56: mol_type = other RNA
ctttcaagactaatagattgctccttacgaggagaccgcttccagctcctcgaagc

SEQ ID NO: 2185 - RNA, 56 nt, synthetic construct
  source 1..56: mol_type = other RNA
ctttcaagactaatagattgctccttacgaggagacgaggagctggaagcgcaaga

SEQ ID NO: 2186 - RNA, 56 nt, synthetic construct
  source 1..56: mol_type = other RNA
ctttcaagactaatagattgctccttacgaggagacctgcacagcacgtgcggacc

SEQ ID NO: 2187 - RNA, 56 nt, synthetic construct
  source 1..56: mol_type = other RNA
ctttcaagactaatagattgctccttacgaggagactggaaaaggccggccagcag

SEQ ID NO: 2188 - RNA, 56 nt, synthetic construct
  source 1..56: mol_type = other RNA
ctttcaagactaatagattgctccttacgaggagacttctggaaaaggccggccag

SEQ ID NO: 2189 - RNA, 56 nt, synthetic construct
  source 1..56: mol_type = other RNA
ctttcaagactaatagattgctccttacgaggagactccagaagaagctgctccga

SEQ ID NO: 2190 - RNA, 56 nt, synthetic construct
  source 1..56: mol_type = other RNA
ctttcaagactaatagattgctccttacgaggagacccagaagaagctgctccgag

SEQ ID NO: 2191 - RNA, 56 nt, synthetic construct
  source 1..56: mol_type = other RNA
ctttcaagactaatagattgctccttacgaggagaccagaagaagctgctccgagg

SEQ ID NO: 2192 - RNA, 56 nt, synthetic construct
  source 1..56: mol_type = other RNA
ctttcaagactaatagattgctccttacgaggagaccaccctcctcctcacagccc

SEQ ID NO: 2193 - RNA, 56 nt, synthetic construct
  source 1..56: mol_type = other RNA
ctttcaagactaatagattgctccttacgaggagacctcaggctctggaccaggcg

SEQ ID NO: 2194 - RNA, 56 nt, synthetic construct
  source 1..56: mol_type = other RNA
ctttcaagactaatagattgctccttacgaggagacgagctgtccggcttctccat

SEQ ID NO: 2195 - RNA, 56 nt, synthetic construct
  source 1..56: mol_type = other RNA
ctttcaagactaatagattgctccttacgaggagacagctgtccggcttctccatg

SEQ ID NO: 2196 - RNA, 56 nt, synthetic construct
  source 1..56: mol_type = other RNA
ctttcaagactaatagattgctccttacgaggagactccatggagcaggcccaggc

SEQ ID NO: 2197 - RNA, 56 nt, synthetic construct
  source 1..56: mol_type = other RNA
ctttcaagactaatagattgctccttacgaggagacgagagctcagggatgacaga

SEQ ID NO: 2198 - RNA, 56 nt, synthetic construct
  source 1..56: mol_type = other RNA
ctttcaagactaatagattgctccttacgaggagacagagctcagggatgacagag

SEQ ID NO: 2199 - RNA, 56 nt, synthetic construct
  source 1..56: mol_type = other RNA
ctttcaagactaatagattgctccttacgaggagacgtgctctgtcatccctgagc

SEQ ID NO: 2200 - RNA, 56 nt, synthetic construct
  source 1..56: mol_type = other RNA
ctttcaagactaatagattgctccttacgaggagacttctcagtcacagccacagc

SEQ ID NO: 2201 - RNA, 56 nt, synthetic construct
  source 1..56: mol_type = other RNA
ctttcaagactaatagattgctccttacgaggagactcagtcacagccacagccct

SEQ ID NO: 2202 - RNA, 56 nt, synthetic construct
  source 1..56: mol_type = other RNA
ctttcaagactaatagattgctccttacgaggagacgtgccgggcagtgtgccagc

SEQ ID NO: 2203 - RNA, 56 nt, synthetic construct
  source 1..56: mol_type = other RNA
ctttcaagactaatagattgctccttacgaggagactgccgggcagtgtgccagct

SEQ ID NO: 2204 - RNA, 56 nt, synthetic construct
  source 1..56: mol_type = other RNA
ctttcaagactaatagattgctccttacgaggagacgcgtcctccccaagctccag

SEQ ID NO: 2205 - RNA, 56 nt, synthetic construct
  source 1..56: mol_type = other RNA
ctttcaagactaatagattgctccttacgaggagacgggaggacgccaagctgccc

SEQ ID NO: 2206 - RNA, 56 nt, synthetic construct
  source 1..56: mol_type = other RNA
ctttcaagactaatagattgctccttacgaggagacgccagctctgccagggcccc

SEQ ID NO: 2207 - RNA, 56 nt, synthetic construct
  source 1..56: mol_type = other RNA
ctttcaagactaatagattgctccttacgaggagacatgtctgcggcccagctccc

SEQ ID NO: 2208 - RNA, 56 nt, synthetic construct
  source 1..56: mol_type = other RNA
ctttcaagactaatagattgctccttacgaggagacgatgtctgcggcccagctcc

SEQ ID NO: 2209 - RNA, 56 nt, synthetic construct
  source 1..56: mol_type = other RNA
ctttcaagactaatagattgctccttacgaggagacccatccgcagacgtgaggac

SEQ ID NO: 2210 - RNA, 56 nt, synthetic construct
  source 1..56: mol_type = other RNA
ctttcaagactaatagattgctccttacgaggagacgccatcgcccaggtcctcac

SEQ ID NO: 2211 - RNA, 56 nt, synthetic construct
  source 1..56: mol_type = other RNA
ctttcaagactaatagattgctccttacgaggagacggccatcgcccaggtcctca

SEQ ID NO: 2212 - RNA, 56 nt, synthetic construct
  source 1..56: mol_type = other RNA
ctttcaagactaatagattgctccttacgaggagacgactaagcctttggccatcg

SEQ ID NO: 2213 - RNA, 56 nt, synthetic construct
  source 1..56: mol_type = other RNA
ctttcaagactaatagattgctccttacgaggagacgtccaacacccaccgcgggc

SEQ ID NO: 2214 - RNA, 56 nt, synthetic construct
  source 1..56: mol_type = other RNA
ctttcaagactaatagattgctccttacgaggagaccaggaggaagctggggaagg

SEQ ID NO: 2215 - RNA, 56 nt, synthetic construct
  source 1..56: mol_type = other RNA
ctttcaagactaatagattgctccttacgaggagaccccagcttcctcctgcaatg

SEQ ID NO: 2216 - RNA, 56 nt, synthetic construct
  source 1..56: mol_type = other RNA
ctttcaagactaatagattgctccttacgaggagacctcctgcaatgcttcctggg

SEQ ID NO: 2217 - RNA, 56 nt, synthetic construct
  source 1..56: mol_type = other RNA
ctttcaagactaatagattgctccttacgaggagacctgggggccctgtggctggc

SEQ ID NO: 2218 - RNA, 56 nt, synthetic construct
  source 1..56: mol_type = other RNA
ctttcaagactaatagattgctccttacgaggagacgccactcagagccagccaca

SEQ ID NO: 2219 - RNA, 56 nt, synthetic construct
  source 1..56: mol_type = other RNA
ctttcaagactaatagattgctccttacgaggagaccgccactcagagccagccac

SEQ ID NO: 2220 - RNA, 56 nt, synthetic construct
  source 1..56: mol_type = other RNA
ctttcaagactaatagattgctccttacgaggagacatttcgccactcagagccag

SEQ ID NO: 2221 - RNA, 56 nt, synthetic construct
  source 1..56: mol_type = other RNA
ctttcaagactaatagattgctccttacgaggagactccttgatttcgccactcag

SEQ ID NO: 2222 - RNA, 56 nt, synthetic construct
  source 1..56: mol_type = other RNA
ctttcaagactaatagattgctccttacgaggagacgggtcaatgctaggtactgc

SEQ ID NO: 2223 - RNA, 56 nt, synthetic construct
  source 1..56: mol_type = other RNA
ctttcaagactaatagattgctccttacgaggagaccttggggtcaatgctaggta

SEQ ID NO: 2224 - RNA, 56 nt, synthetic construct
  source 1..56: mol_type = other RNA
ctttcaagactaatagattgctccttacgaggagacttccttggggtcaatgctag

SEQ ID NO: 2225 - RNA, 56 nt, synthetic construct
  source 1..56: mol_type = other RNA
ctttcaagactaatagattgctccttacgaggagacaccccaaggaagaagaggcc

SEQ ID NO: 2226 - RNA, 56 nt, synthetic construct
  source 1..56: mol_type = other RNA
ctttcaagactaatagattgctccttacgaggagactcatagggcctcttcttcct

SEQ ID NO: 2227 - RNA, 56 nt, synthetic construct
  source 1..56: mol_type = other RNA
ctttcaagactaatagattgctccttacgaggagacctggctgggctgatcttcca

SEQ ID NO: 2228 - RNA, 56 nt, synthetic construct
  source 1..56: mol_type = other RNA
ctttcaagactaatagattgctccttacgaggagactggctgggctgatcttccag

SEQ ID NO: 2229 - RNA, 56 nt, synthetic construct
  source 1..56: mol_type = other RNA
ctttcaagactaatagattgctccttacgaggagaccagcctcccgcccgctgcct

SEQ ID NO: 2230 - RNA, 56 nt, synthetic construct
  source 1..56: mol_type = other RNA
ctttcaagactaatagattgctccttacgaggagacctgtccaccgaggcagccgc

SEQ ID NO: 2231 - RNA, 56 nt, synthetic construct
  source 1..56: mol_type = other RNA
ctttcaagactaatagattgctccttacgaggagactgcttcctgtccaccgaggc

SEQ ID NO: 2232 - RNA, 56 nt, synthetic construct
  source 1..56: mol_type = other RNA
ctttcaagactaatagattgctccttacgaggagacaggtacctcgcaagcacctt

SEQ ID NO: 2233 - RNA, 56 nt, synthetic construct
  source 1..56: mol_type = other RNA
ctttcaagactaatagattgctccttacgaggagaccgaggtacctgaagcggctg

SEQ ID NO: 2234 - RNA, 56 nt, synthetic construct
  source 1..56: mol_type = other RNA
ctttcaagactaatagattgctccttacgaggagaccagcctcctcggcctcgtgg

SEQ ID NO: 2235 - RNA, 56 nt, synthetic construct
  source 1..56: mol_type = other RNA
ctttcaagactaatagattgctccttacgaggagacggcagcacgtggtacaggag

SEQ ID NO: 2236 - RNA, 56 nt, synthetic construct
  source 1..56: mol_type = other RNA
ctttcaagactaatagattgctccttacgaggagacgcagcacgtggtacaggagc

SEQ ID NO: 2237 - RNA, 56 nt, synthetic construct
  source 1..56: mol_type = other RNA
ctttcaagactaatagattgctccttacgaggagactctgggcacccgcctcacgc

SEQ ID NO: 2238 - RNA, 56 nt, synthetic construct
  source 1..56: mol_type = other RNA
ctttcaagactaatagattgctccttacgaggagacctgggcacccgcctcacgcc

SEQ ID NO: 2239 - RNA, 56 nt, synthetic construct
  source 1..56: mol_type = other RNA
ctttcaagactaatagattgctccttacgaggagactgggcacccgcctcacgcct

SEQ ID NO: 2240 - RNA, 56 nt, synthetic construct
  source 1..56: mol_type = other RNA
ctttcaagactaatagattgctccttacgaggagaccccagtacatgtgcatcagg

SEQ ID NO: 2241 - RNA, 56 nt, synthetic construct
  source 1..56: mol_type = other RNA
ctttcaagactaatagattgctccttacgaggagacgcccgccgcctccaaggcct

SEQ ID NO: 2242 - RNA, 56 nt, synthetic construct
  source 1..56: mol_type = other RNA
ctttcaagactaatagattgctccttacgaggagacgaggcggcgggccaagactt

SEQ ID NO: 2243 - RNA, 56 nt, synthetic construct
  source 1..56: mol_type = other RNA
ctttcaagactaatagattgctccttacgaggagactccctggacctccgcagcac

SEQ ID NO: 2244 - RNA, 56 nt, synthetic construct
  source 1..56: mol_type = other RNA
ctttcaagactaatagattgctccttacgaggagacgcccctctggattggggagc

SEQ ID NO: 2245 - RNA, 56 nt, synthetic construct
  source 1..56: mol_type = other RNA
ctttcaagactaatagattgctccttacgaggagaccccctctggattggggagcc

SEQ ID NO: 2246 - RNA, 56 nt, synthetic construct
  source 1..56: mol_type = other RNA
ctttcaagactaatagattgctccttacgaggagacgggagcctcgtgggactcag

SEQ ID NO: 2247 - RNA, 56 nt, synthetic construct
  source 1..56: mol_type = other RNA
ctttcaagactaatagattgctccttacgaggagacgtctccccatgctgctgcag

SEQ ID NO: 2248 - RNA, 56 nt, synthetic construct
  source 1..56: mol_type = other RNA
ctttcaagactaatagattgctccttacgaggagactcctctgctgcctgaagtag

SEQ ID NO: 2249 - RNA, 56 nt, synthetic construct
  source 1..56: mol_type = other RNA
ctttcaagactaatagattgctccttacgaggagacaggcagcagaggagaagttc

SEQ ID NO: 2250 - RNA, 56 nt, synthetic construct
  source 1..56: mol_type = other RNA
ctttcaagactaatagattgctccttacgaggagacaaaggctcgatggtgaactt

SEQ ID NO: 2251 - RNA, 56 nt, synthetic construct
  source 1..56: mol_type = other RNA
ctttcaagactaatagattgctccttacgaggagacgaaaggctcgatggtgaact

SEQ ID NO: 2252 - RNA, 56 nt, synthetic construct
  source 1..56: mol_type = other RNA
ctttcaagactaatagattgctccttacgaggagacaccatcgagcctttcaaagc

SEQ ID NO: 2253 - RNA, 56 nt, synthetic construct
  source 1..56: mol_type = other RNA
ctttcaagactaatagattgctccttacgaggagacgctttgaaaggctcgatggt

SEQ ID NO: 2254 - RNA, 56 nt, synthetic construct
  source 1..56: mol_type = other RNA
ctttcaagactaatagattgctccttacgaggagacagggacttggctttgaaagg

SEQ ID NO: 2255 - RNA, 56 nt, synthetic construct
  source 1..56: mol_type = other RNA
ctttcaagactaatagattgctccttacgaggagaccaaagccaagtccctgaagg

SEQ ID NO: 2256 - RNA, 56 nt, synthetic construct
  source 1..56: mol_type = other RNA
ctttcaagactaatagattgctccttacgaggagacaaagccaagtccctgaagga

SEQ ID NO: 2257 - RNA, 56 nt, synthetic construct
  source 1..56: mol_type = other RNA
ctttcaagactaatagattgctccttacgaggagaccacatccttcagggacttgg

SEQ ID NO: 2258 - RNA, 56 nt, synthetic construct
  source 1..56: mol_type = other RNA
ctttcaagactaatagattgctccttacgaggagacccaggtcttccacatccttc

SEQ ID NO: 2259 - RNA, 56 nt, synthetic construct
  source 1..56: mol_type = other RNA
ctttcaagactaatagattgctccttacgaggagaccccaggtcttccacatcctt

SEQ ID NO: 2260 - RNA, 56 nt, synthetic construct
  source 1..56: mol_type = other RNA
ctttcaagactaatagattgctccttacgaggagacctcggaagacacagctgggg

SEQ ID NO: 2261 - RNA, 56 nt, synthetic construct
  source 1..56: mol_type = other RNA
ctttcaagactaatagattgctccttacgaggagacggtcccgaacagcagggagc

SEQ ID NO: 2262 - RNA, 56 nt, synthetic construct
  source 1..56: mol_type = other RNA
ctttcaagactaatagattgctccttacgaggagacaggtcccgaacagcagggag

SEQ ID NO: 2263 - RNA, 56 nt, synthetic construct
  source 1..56: mol_type = other RNA
ctttcaagactaatagattgctccttacgaggagactttaggtcccgaacagcagg

SEQ ID NO: 2264 - RNA, 56 nt, synthetic construct
  source 1..56: mol_type = other RNA
ctttcaagactaatagattgctccttacgaggagacctttaggtcccgaacagcag

SEQ ID NO: 2265 - RNA, 56 nt, synthetic construct
  source 1..56: mol_type = other RNA
ctttcaagactaatagattgctccttacgaggagacgggacctaaagaaactggag

SEQ ID NO: 2266 - RNA, 56 nt, synthetic construct
  source 1..56: mol_type = other RNA
ctttcaagactaatagattgctccttacgaggagacgggaaagcctgggggcctga

SEQ ID NO: 2267 - RNA, 56 nt, synthetic construct
  source 1..56: mol_type = other RNA
ctttcaagactaatagattgctccttacgaggagacggggaaagcctgggggcctg

SEQ ID NO: 2268 - RNA, 56 nt, synthetic construct
  source 1..56: mol_type = other RNA
ctttcaagactaatagattgctccttacgaggagacccccaaactggtgcggatcc

SEQ ID NO: 2269 - RNA, 56 nt, synthetic construct
  source 1..56: mol_type = other RNA
ctttcaagactaatagattgctccttacgaggagaccccaaactggtgcggatcct

SEQ ID NO: 2270 - RNA, 56 nt, synthetic construct
  source 1..56: mol_type = other RNA
ctttcaagactaatagattgctccttacgaggagacttctcactcagcgcatccag

SEQ ID NO: 2271 - RNA, 56 nt, synthetic construct
  source 1..56: mol_type = other RNA
ctttcaagactaatagattgctccttacgaggagacagctgggggaaggtggctga

SEQ ID NO: 2272 - RNA, 56 nt, synthetic construct
  source 1..56: mol_type = other RNA
ctttcaagactaatagattgctccttacgaggagacccccagctgaagtccttgga

SEQ ID NO: 2273 - RNA, 56 nt, synthetic construct
  source 1..56: mol_type = other RNA
ctttcaagactaatagattgctccttacgaggagaccaaggacttcagctggggga

SEQ ID NO: 2274 - RNA, 56 nt, synthetic construct
  source 1..56: mol_type = other RNA
ctttcaagactaatagattgctccttacgaggagacccaaggacttcagctggggg

SEQ ID NO: 2275 - RNA, 56 nt, synthetic construct
  source 1..56: mol_type = other RNA
ctttcaagactaatagattgctccttacgaggagacagggtttccaaggacttcag

SEQ ID NO: 2276 - RNA, 56 nt, synthetic construct
  source 1..56: mol_type = other RNA
ctttcaagactaatagattgctccttacgaggagactaggcacccaggtcagtgat

SEQ ID NO: 2277 - RNA, 56 nt, synthetic construct
  source 1..56: mol_type = other RNA
ctttcaagactaatagattgctccttacgaggagacgtaggcacccaggtcagtga

SEQ ID NO: 2278 - RNA, 56 nt, synthetic construct
  source 1..56: mol_type = other RNA
ctttcaagactaatagattgctccttacgaggagacgctcgctgcatccctgctca

SEQ ID NO: 2279 - RNA, 56 nt, synthetic construct
  source 1..56: mol_type = other RNA
ctttcaagactaatagattgctccttacgaggagacgcctgagcagggatgcagcg

SEQ ID NO: 2280 - RNA, 56 nt, synthetic construct
  source 1..56: mol_type = other RNA
ctttcaagactaatagattgctccttacgaggagactacaataactgcatctgcga

SEQ ID NO: 2281 - RNA, 56 nt, synthetic construct
  source 1..56: mol_type = other RNA
ctttcaagactaatagattgctccttacgaggagacgctcgtgtgcttccggacat

SEQ ID NO: 2282 - RNA, 56 nt, synthetic construct
  source 1..56: mol_type = other RNA
ctttcaagactaatagattgctccttacgaggagaccggacatggtgtccctccgg

SEQ ID NO: 2283 - RNA, 56 nt, synthetic construct
  source 1..56: mol_type = other RNA
ctttcaagactaatagattgctccttacgaggagacacggctgccggggcccagca

SEQ ID NO: 2284 - RNA, 56 nt, synthetic construct
  source 1..56: mol_type = other RNA
ctttcaagactaatagattgctccttacgaggagacggaggtgtcctcatgtggag

SEQ ID NO: 2285 - RNA, 56 nt, synthetic construct
  source 1..56: mol_type = other RNA
ctttcaagactaatagattgctccttacgaggagacctggacactgaatgggatgg

SEQ ID NO: 2286 - RNA, 56 nt, synthetic construct
  source 1..56: mol_type = other RNA
ctttcaagactaatagattgctccttacgaggagacagtgtccaggaacacctgca

SEQ ID NO: 2287 - RNA, 56 nt, synthetic construct
  source 1..56: mol_type = other RNA
ctttcaagactaatagattgctccttacgaggagaccaggtgttcctggacactga

SEQ ID NO: 2288 - RNA, 56 nt, synthetic construct
  source 1..56: mol_type = other RNA
ctttcaagactaatagattgctccttacgaggagacttgcaggtgttcctggacac

SEQ ID NO: 2289 - RNA, 56 nt, synthetic construct
  source 1..56: mol_type = other RNA
ctttcaagactaatagattgctccttacgaggagacacggatcagcctgagatgat

SEQ ID NO: 2290 - RNA, 37 nt, synthetic construct
  source 1..37: mol_type = other RNA
attgctccttacgaggagacagcaggctgttgtgtga

SEQ ID NO: 2291 - RNA, 37 nt, synthetic construct
  source 1..37: mol_type = other RNA
attgctccttacgaggagaccatgtcacacaacagcc

SEQ ID NO: 2292 - RNA, 37 nt, synthetic construct
  source 1..37: mol_type = other RNA
attgctccttacgaggagactgtgacatggaaggtga

SEQ ID NO: 2293 - RNA, 37 nt, synthetic construct
  source 1..37: mol_type = other RNA
attgctccttacgaggagacatcaccttccatgtcac

SEQ ID NO: 2294 - RNA, 37 nt, synthetic construct
  source 1..37: mol_type = other RNA
attgctccttacgaggagacgcataagcctccctggt

SEQ ID NO: 2295 - RNA, 37 nt, synthetic construct
  source 1..37: mol_type = other RNA
attgctccttacgaggagaccaggactcccagctgga

SEQ ID NO: 2296 - RNA, 37 nt, synthetic construct
  source 1..37: mol_type = other RNA
attgctccttacgaggagacctcaggccctccagctg

SEQ ID NO: 2297 - RNA, 37 nt, synthetic construct
  source 1..37: mol_type = other RNA
attgctccttacgaggagactgctggcatctccatac

SEQ ID NO: 2298 - RNA, 37 nt, synthetic construct
  source 1..37: mol_type = other RNA
attgctccttacgaggagactgcccaacttctgctgg

SEQ ID NO: 2299 - RNA, 37 nt, synthetic construct
  source 1..37: mol_type = other RNA
attgctccttacgaggagacctgcccaacttctgctg

SEQ ID NO: 2300 - RNA, 37 nt, synthetic construct
  source 1..37: mol_type = other RNA
attgctccttacgaggagactctgcccaacttctgct

SEQ ID NO: 2301 - RNA, 37 nt, synthetic construct
  source 1..37: mol_type = other RNA
attgctccttacgaggagactgacttttctgcccaac

SEQ ID NO: 2302 - RNA, 37 nt, synthetic construct
  source 1..37: mol_type = other RNA
attgctccttacgaggagacctgacttttctgcccaa

SEQ ID NO: 2303 - RNA, 37 nt, synthetic construct
  source 1..37: mol_type = other RNA
attgctccttacgaggagactctgacttttctgccca

SEQ ID NO: 2304 - RNA, 37 nt, synthetic construct
  source 1..37: mol_type = other RNA
attgctccttacgaggagacccagaggagcttccggc

SEQ ID NO: 2305 - RNA, 37 nt, synthetic construct
  source 1..37: mol_type = other RNA
attgctccttacgaggagacaggtctgccggaagctc

SEQ ID NO: 2306 - RNA, 37 nt, synthetic construct
  source 1..37: mol_type = other RNA
attgctccttacgaggagaccggcagacctgaagcac

SEQ ID NO: 2307 - RNA, 37 nt, synthetic construct
  source 1..37: mol_type = other RNA
attgctccttacgaggagaccagtgcttcaggtctgc

SEQ ID NO: 2308 - RNA, 37 nt, synthetic construct
  source 1..37: mol_type = other RNA
attgctccttacgaggagacaacagcgcaggcagtgg

SEQ ID NO: 2309 - RNA, 37 nt, synthetic construct
  source 1..37: mol_type = other RNA
attgctccttacgaggagacaaccaggagccagcctc

SEQ ID NO: 2310 - RNA, 37 nt, synthetic construct
  source 1..37: mol_type = other RNA
attgctccttacgaggagactccaggcgcatctggcc

SEQ ID NO: 2311 - RNA, 37 nt, synthetic construct
  source 1..37: mol_type = other RNA
attgctccttacgaggagacctccaggcgcatctggc

SEQ ID NO: 2312 - RNA, 37 nt, synthetic construct
  source 1..37: mol_type = other RNA
attgctccttacgaggagactctccaggcgcatctgg

SEQ ID NO: 2313 - RNA, 37 nt, synthetic construct
  source 1..37: mol_type = other RNA
attgctccttacgaggagacctccagttcctcgttga

SEQ ID NO: 2314 - RNA, 37 nt, synthetic construct
  source 1..37: mol_type = other RNA
attgctccttacgaggagactccagttcctcgttgag

SEQ ID NO: 2315 - RNA, 37 nt, synthetic construct
  source 1..37: mol_type = other RNA
attgctccttacgaggagacaggcagctcaacgagga

SEQ ID NO: 2316 - RNA, 37 nt, synthetic construct
  source 1..37: mol_type = other RNA
attgctccttacgaggagacctcgttgagctgcctga

SEQ ID NO: 2317 - RNA, 37 nt, synthetic construct
  source 1..37: mol_type = other RNA
attgctccttacgaggagacagctgcctgaatctccc

SEQ ID NO: 2318 - RNA, 37 nt, synthetic construct
  source 1..37: mol_type = other RNA
attgctccttacgaggagacgtccccaccatctccac

SEQ ID NO: 2319 - RNA, 37 nt, synthetic construct
  source 1..37: mol_type = other RNA
attgctccttacgaggagactccccaccatctccact

SEQ ID NO: 2320 - RNA, 37 nt, synthetic construct
  source 1..37: mol_type = other RNA
attgctccttacgaggagacccagagcccatggggca

SEQ ID NO: 2321 - RNA, 37 nt, synthetic construct
  source 1..37: mol_type = other RNA
attgctccttacgaggagacgccagagcccatggggc

SEQ ID NO: 2322 - RNA, 37 nt, synthetic construct
  source 1..37: mol_type = other RNA
attgctccttacgaggagaccagcctcagagatttgc

SEQ ID NO: 2323 - RNA, 37 nt, synthetic construct
  source 1..37: mol_type = other RNA
attgctccttacgaggagacggaggccgtggacagtg

SEQ ID NO: 2324 - RNA, 37 nt, synthetic construct
  source 1..37: mol_type = other RNA
attgctccttacgaggagacactgtccacggcctccc

SEQ ID NO: 2325 - RNA, 37 nt, synthetic construct
  source 1..37: mol_type = other RNA
attgctccttacgaggagacgctccatcagccactga

SEQ ID NO: 2326 - RNA, 37 nt, synthetic construct
  source 1..37: mol_type = other RNA
attgctccttacgaggagacaggcatgctgggcaggt

SEQ ID NO: 2327 - RNA, 37 nt, synthetic construct
  source 1..37: mol_type = other RNA
attgctccttacgaggagacctcgggaggtcagggca

SEQ ID NO: 2328 - RNA, 37 nt, synthetic construct
  source 1..37: mol_type = other RNA
attgctccttacgaggagacgctcgggaggtcagggc

SEQ ID NO: 2329 - RNA, 37 nt, synthetic construct
  source 1..37: mol_type = other RNA
attgctccttacgaggagacgagacctctccagctgc

SEQ ID NO: 2330 - RNA, 37 nt, synthetic construct
  source 1..37: mol_type = other RNA
attgctccttacgaggagacttggagacctctccagc

SEQ ID NO: 2331 - RNA, 37 nt, synthetic construct
  source 1..37: mol_type = other RNA
attgctccttacgaggagacgaagcttgttggagacc

SEQ ID NO: 2332 - RNA, 37 nt, synthetic construct
  source 1..37: mol_type = other RNA
attgctccttacgaggagacggaagcttgttggagac

SEQ ID NO: 2333 - RNA, 37 nt, synthetic construct
  source 1..37: mol_type = other RNA
attgctccttacgaggagactggaagcttgttggaga

SEQ ID NO: 2334 - RNA, 37 nt, synthetic construct
  source 1..37: mol_type = other RNA
attgctccttacgaggagactaccgctcactgcagga

SEQ ID NO: 2335 - RNA, 37 nt, synthetic construct
  source 1..37: mol_type = other RNA
attgctccttacgaggagacctgctgctcctctccag

SEQ ID NO: 2336 - RNA, 37 nt, synthetic construct
  source 1..37: mol_type = other RNA
attgctccttacgaggagacccgctccaggctcttgc

SEQ ID NO: 2337 - RNA, 37 nt, synthetic construct
  source 1..37: mol_type = other RNA
attgctccttacgaggagactgcccagtccggggtgg

SEQ ID NO: 2338 - RNA, 37 nt, synthetic construct
  source 1..37: mol_type = other RNA
attgctccttacgaggagacggccagctgccgttctg

SEQ ID NO: 2339 - RNA, 37 nt, synthetic construct
  source 1..37: mol_type = other RNA
attgctccttacgaggagacgcagccaacagcacctc

SEQ ID NO: 2340 - RNA, 37 nt, synthetic construct
  source 1..37: mol_type = other RNA
attgctccttacgaggagacgctgccaaggagcaccg

SEQ ID NO: 2341 - RNA, 37 nt, synthetic construct
  source 1..37: mol_type = other RNA
attgctccttacgaggagaccccagcacagcaatcac

SEQ ID NO: 2342 - RNA, 37 nt, synthetic construct
  source 1..37: mol_type = other RNA
attgctccttacgaggagacgcccagcacagcaatca

SEQ ID NO: 2343 - RNA, 37 nt, synthetic construct
  source 1..37: mol_type = other RNA
attgctccttacgaggagacctgtgctgggcaaagct

SEQ ID NO: 2344 - RNA, 37 nt, synthetic construct
  source 1..37: mol_type = other RNA
attgctccttacgaggagacccctgaccagctttgcc

SEQ ID NO: 2345 - RNA, 37 nt, synthetic construct
  source 1..37: mol_type = other RNA
attgctccttacgaggagacggctggggcagtgagcc

SEQ ID NO: 2346 - RNA, 37 nt, synthetic construct
  source 1..37: mol_type = other RNA
attgctccttacgaggagactggccggcttccccagt

SEQ ID NO: 2347 - RNA, 37 nt, synthetic construct
  source 1..37: mol_type = other RNA
attgctccttacgaggagaccccagtacgactttgtc

SEQ ID NO: 2348 - RNA, 37 nt, synthetic construct
  source 1..37: mol_type = other RNA
attgctccttacgaggagacgtcttctctgtcccctg

SEQ ID NO: 2349 - RNA, 37 nt, synthetic construct
  source 1..37: mol_type = other RNA
attgctccttacgaggagactcttctctgtcccctgc

SEQ ID NO: 2350 - RNA, 37 nt, synthetic construct
  source 1..37: mol_type = other RNA
attgctccttacgaggagactctgtcccctgccattg

SEQ ID NO: 2351 - RNA, 37 nt, synthetic construct
  source 1..37: mol_type = other RNA
attgctccttacgaggagacaagcaatggcaggggac

SEQ ID NO: 2352 - RNA, 37 nt, synthetic construct
  source 1..37: mol_type = other RNA
attgctccttacgaggagaccttgaaccgtccggggg

SEQ ID NO: 2353 - RNA, 37 nt, synthetic construct
  source 1..37: mol_type = other RNA
attgctccttacgaggagacaaccgtccgggggatgc

SEQ ID NO: 2354 - RNA, 37 nt, synthetic construct
  source 1..37: mol_type = other RNA
attgctccttacgaggagactccctgggcccacagcc

SEQ ID NO: 2355 - RNA, 37 nt, synthetic construct
  source 1..37: mol_type = other RNA
attgctccttacgaggagacaagatgtggctgaaaac

SEQ ID NO: 2356 - RNA, 37 nt, synthetic construct
  source 1..37: mol_type = other RNA
attgctccttacgaggagactcagccacatcttgaag

SEQ ID NO: 2357 - RNA, 37 nt, synthetic construct
  source 1..37: mol_type = other RNA
attgctccttacgaggagaccagccacatcttgaaga

SEQ ID NO: 2358 - RNA, 37 nt, synthetic construct
  source 1..37: mol_type = other RNA
attgctccttacgaggagacagccacatcttgaagag

SEQ ID NO: 2359 - RNA, 37 nt, synthetic construct
  source 1..37: mol_type = other RNA
attgctccttacgaggagacaagagacctgaccgcgt

SEQ ID NO: 2360 - RNA, 37 nt, synthetic construct
  source 1..37: mol_type = other RNA
attgctccttacgaggagactgctcatcctagacggc

SEQ ID NO: 2361 - RNA, 37 nt, synthetic construct
  source 1..37: mol_type = other RNA
attgctccttacgaggagaccagctcctcgaagccgt

SEQ ID NO: 2362 - RNA, 37 nt, synthetic construct
  source 1..37: mol_type = other RNA
attgctccttacgaggagaccgcttccagctcctcga

SEQ ID NO: 2363 - RNA, 37 nt, synthetic construct
  source 1..37: mol_type = other RNA
attgctccttacgaggagacgaggagctggaagcgca

SEQ ID NO: 2364 - RNA, 37 nt, synthetic construct
  source 1..37: mol_type = other RNA
attgctccttacgaggagacctgcacagcacgtgcgg

SEQ ID NO: 2365 - RNA, 37 nt, synthetic construct
  source 1..37: mol_type = other RNA
attgctccttacgaggagactggaaaaggccggccag

SEQ ID NO: 2366 - RNA, 37 nt, synthetic construct
  source 1..37: mol_type = other RNA
attgctccttacgaggagacttctggaaaaggccggc

SEQ ID NO: 2367 - RNA, 37 nt, synthetic construct
  source 1..37: mol_type = other RNA
attgctccttacgaggagactccagaagaagctgctc

SEQ ID NO: 2368 - RNA, 37 nt, synthetic construct
  source 1..37: mol_type = other RNA
attgctccttacgaggagacccagaagaagctgctcc

SEQ ID NO: 2369 - RNA, 37 nt, synthetic construct
  source 1..37: mol_type = other RNA
attgctccttacgaggagaccagaagaagctgctccg

SEQ ID NO: 2370 - RNA, 37 nt, synthetic construct
  source 1..37: mol_type = other RNA
attgctccttacgaggagaccaccctcctcctcacag

SEQ ID NO: 2371 - RNA, 37 nt, synthetic construct
  source 1..37: mol_type = other RNA
attgctccttacgaggagacctcaggctctggaccag

SEQ ID NO: 2372 - RNA, 37 nt, synthetic construct
  source 1..37: mol_type = other RNA
attgctccttacgaggagacgagctgtccggcttctc

SEQ ID NO: 2373 - RNA, 37 nt, synthetic construct
  source 1..37: mol_type = other RNA
attgctccttacgaggagacagctgtccggcttctcc

SEQ ID NO: 2374 - RNA, 37 nt, synthetic construct
  source 1..37: mol_type = other RNA
attgctccttacgaggagactccatggagcaggccca

SEQ ID NO: 2375 - RNA, 37 nt, synthetic construct
  source 1..37: mol_type = other RNA
attgctccttacgaggagacgagagctcagggatgac

SEQ ID NO: 2376 - RNA, 37 nt, synthetic construct
  source 1..37: mol_type = other RNA
attgctccttacgaggagacagagctcagggatgaca

SEQ ID NO: 2377 - RNA, 37 nt, synthetic construct
  source 1..37: mol_type = other RNA
attgctccttacgaggagacgtgctctgtcatccctg

SEQ ID NO: 2378 - RNA, 37 nt, synthetic construct
  source 1..37: mol_type = other RNA
attgctccttacgaggagacttctcagtcacagccac

SEQ ID NO: 2379 - RNA, 37 nt, synthetic construct
  source 1..37: mol_type = other RNA
attgctccttacgaggagactcagtcacagccacagc

SEQ ID NO: 2380 - RNA, 37 nt, synthetic construct
  source 1..37: mol_type = other RNA
attgctccttacgaggagacgtgccgggcagtgtgcc

SEQ ID NO: 2381 - RNA, 37 nt, synthetic construct
  source 1..37: mol_type = other RNA
attgctccttacgaggagactgccgggcagtgtgcca

SEQ ID NO: 2382 - RNA, 37 nt, synthetic construct
  source 1..37: mol_type = other RNA
attgctccttacgaggagacgcgtcctccccaagctc

SEQ ID NO: 2383 - RNA, 37 nt, synthetic construct
  source 1..37: mol_type = other RNA
attgctccttacgaggagacgggaggacgccaagctg

SEQ ID NO: 2384 - RNA, 37 nt, synthetic construct
  source 1..37: mol_type = other RNA
attgctccttacgaggagacgccagctctgccagggc

SEQ ID NO: 2385 - RNA, 37 nt, synthetic construct
  source 1..37: mol_type = other RNA
attgctccttacgaggagacatgtctgcggcccagct

SEQ ID NO: 2386 - RNA, 37 nt, synthetic construct
  source 1..37: mol_type = other RNA
attgctccttacgaggagacgatgtctgcggcccagc

SEQ ID NO: 2387 - RNA, 37 nt, synthetic construct
  source 1..37: mol_type = other RNA
attgctccttacgaggagacccatccgcagacgtgag

SEQ ID NO: 2388 - RNA, 37 nt, synthetic construct
  source 1..37: mol_type = other RNA
attgctccttacgaggagacgccatcgcccaggtcct

SEQ ID NO: 2389 - RNA, 37 nt, synthetic construct
  source 1..37: mol_type = other RNA
attgctccttacgaggagacggccatcgcccaggtcc

SEQ ID NO: 2390 - RNA, 37 nt, synthetic construct
  source 1..37: mol_type = other RNA
attgctccttacgaggagacgactaagcctttggcca

SEQ ID NO: 2391 - RNA, 37 nt, synthetic construct
  source 1..37: mol_type = other RNA
attgctccttacgaggagacgtccaacacccaccgcg

SEQ ID NO: 2392 - RNA, 37 nt, synthetic construct
  source 1..37: mol_type = other RNA
attgctccttacgaggagaccaggaggaagctgggga

SEQ ID NO: 2393 - RNA, 37 nt, synthetic construct
  source 1..37: mol_type = other RNA
attgctccttacgaggagaccccagcttcctcctgca

SEQ ID NO: 2394 - RNA, 37 nt, synthetic construct
  source 1..37: mol_type = other RNA
attgctccttacgaggagacctcctgcaatgcttcct

SEQ ID NO: 2395 - RNA, 37 nt, synthetic construct
  source 1..37: mol_type = other RNA
attgctccttacgaggagacctgggggccctgtggct

SEQ ID NO: 2396 - RNA, 37 nt, synthetic construct
  source 1..37: mol_type = other RNA
attgctccttacgaggagacgccactcagagccagcc

SEQ ID NO: 2397 - RNA, 37 nt, synthetic construct
  source 1..37: mol_type = other RNA
attgctccttacgaggagaccgccactcagagccagc

SEQ ID NO: 2398 - RNA, 37 nt, synthetic construct
  source 1..37: mol_type = other RNA
attgctccttacgaggagacatttcgccactcagagc

SEQ ID NO: 2399 - RNA, 37 nt, synthetic construct
  source 1..37: mol_type = other RNA
attgctccttacgaggagactccttgatttcgccact

SEQ ID NO: 2400 - RNA, 37 nt, synthetic construct
  source 1..37: mol_type = other RNA
attgctccttacgaggagacgggtcaatgctaggtac

SEQ ID NO: 2401 - RNA, 37 nt, synthetic construct
  source 1..37: mol_type = other RNA
attgctccttacgaggagaccttggggtcaatgctag

SEQ ID NO: 2402 - RNA, 37 nt, synthetic construct
  source 1..37: mol_type = other RNA
attgctccttacgaggagacttccttggggtcaatgc

SEQ ID NO: 2403 - RNA, 37 nt, synthetic construct
  source 1..37: mol_type = other RNA
attgctccttacgaggagacaccccaaggaagaagag

SEQ ID NO: 2404 - RNA, 37 nt, synthetic construct
  source 1..37: mol_type = other RNA
attgctccttacgaggagactcatagggcctcttctt

SEQ ID NO: 2405 - RNA, 37 nt, synthetic construct
  source 1..37: mol_type = other RNA
attgctccttacgaggagacctggctgggctgatctt

SEQ ID NO: 2406 - RNA, 37 nt, synthetic construct
  source 1..37: mol_type = other RNA
attgctccttacgaggagactggctgggctgatcttc

SEQ ID NO: 2407 - RNA, 37 nt, synthetic construct
  source 1..37: mol_type = other RNA
attgctccttacgaggagaccagcctcccgcccgctg

SEQ ID NO: 2408 - RNA, 37 nt, synthetic construct
  source 1..37: mol_type = other RNA
attgctccttacgaggagacctgtccaccgaggcagc

SEQ ID NO: 2409 - RNA, 37 nt, synthetic construct
  source 1..37: mol_type = other RNA
attgctccttacgaggagactgcttcctgtccaccga

SEQ ID NO: 2410 - RNA, 37 nt, synthetic construct
  source 1..37: mol_type = other RNA
attgctccttacgaggagacaggtacctcgcaagcac

SEQ ID NO: 2411 - RNA, 37 nt, synthetic construct
  source 1..37: mol_type = other RNA
attgctccttacgaggagaccgaggtacctgaagcgg

SEQ ID NO: 2412 - RNA, 37 nt, synthetic construct
  source 1..37: mol_type = other RNA
attgctccttacgaggagaccagcctcctcggcctcg

SEQ ID NO: 2413 - RNA, 37 nt, synthetic construct
  source 1..37: mol_type = other RNA
attgctccttacgaggagacggcagcacgtggtacag

SEQ ID NO: 2414 - RNA, 37 nt, synthetic construct
  source 1..37: mol_type = other RNA
attgctccttacgaggagacgcagcacgtggtacagg

SEQ ID NO: 2415 - RNA, 37 nt, synthetic construct
  source 1..37: mol_type = other RNA
attgctccttacgaggagactctgggcacccgcctca

SEQ ID NO: 2416 - RNA, 37 nt, synthetic construct
  source 1..37: mol_type = other RNA
attgctccttacgaggagacctgggcacccgcctcac

SEQ ID NO: 2417 - RNA, 37 nt, synthetic construct
  source 1..37: mol_type = other RNA
attgctccttacgaggagactgggcacccgcctcacg

SEQ ID NO: 2418 - RNA, 37 nt, synthetic construct
  source 1..37: mol_type = other RNA
attgctccttacgaggagaccccagtacatgtgcatc

SEQ ID NO: 2419 - RNA, 37 nt, synthetic construct
  source 1..37: mol_type = other RNA
attgctccttacgaggagacgcccgccgcctccaagg

SEQ ID NO: 2420 - RNA, 37 nt, synthetic construct
  source 1..37: mol_type = other RNA
attgctccttacgaggagacgaggcggcgggccaaga

SEQ ID NO: 2421 - RNA, 37 nt, synthetic construct
  source 1..37: mol_type = other RNA
attgctccttacgaggagactccctggacctccgcag

SEQ ID NO: 2422 - RNA, 37 nt, synthetic construct
  source 1..37: mol_type = other RNA
attgctccttacgaggagacgcccctctggattgggg

SEQ ID NO: 2423 - RNA, 37 nt, synthetic construct
  source 1..37: mol_type = other RNA
attgctccttacgaggagaccccctctggattgggga

SEQ ID NO: 2424 - RNA, 37 nt, synthetic construct
  source 1..37: mol_type = other RNA
attgctccttacgaggagacgggagcctcgtgggact

SEQ ID NO: 2425 - RNA, 37 nt, synthetic construct
  source 1..37: mol_type = other RNA
attgctccttacgaggagacgtctccccatgctgctg

SEQ ID NO: 2426 - RNA, 37 nt, synthetic construct
  source 1..37: mol_type = other RNA
attgctccttacgaggagactcctctgctgcctgaag

SEQ ID NO: 2427 - RNA, 37 nt, synthetic construct
  source 1..37: mol_type = other RNA
attgctccttacgaggagacaggcagcagaggagaag

SEQ ID NO: 2428 - RNA, 37 nt, synthetic construct
  source 1..37: mol_type = other RNA
attgctccttacgaggagacaaaggctcgatggtgaa

SEQ ID NO: 2429 - RNA, 37 nt, synthetic construct
  source 1..37: mol_type = other RNA
attgctccttacgaggagacgaaaggctcgatggtga

SEQ ID NO: 2430 - RNA, 37 nt, synthetic construct
  source 1..37: mol_type = other RNA
attgctccttacgaggagacaccatcgagcctttcaa

SEQ ID NO: 2431 - RNA, 37 nt, synthetic construct
  source 1..37: mol_type = other RNA
attgctccttacgaggagacgctttgaaaggctcgat

SEQ ID NO: 2432 - RNA, 37 nt, synthetic construct
  source 1..37: mol_type = other RNA
attgctccttacgaggagacagggacttggctttgaa

SEQ ID NO: 2433 - RNA, 37 nt, synthetic construct
  source 1..37: mol_type = other RNA
attgctccttacgaggagaccaaagccaagtccctga

SEQ ID NO: 2434 - RNA, 37 nt, synthetic construct
  source 1..37: mol_type = other RNA
attgctccttacgaggagacaaagccaagtccctgaa

SEQ ID NO: 2435 - RNA, 37 nt, synthetic construct
  source 1..37: mol_type = other RNA
attgctccttacgaggagaccacatccttcagggact

SEQ ID NO: 2436 - RNA, 37 nt, synthetic construct
  source 1..37: mol_type = other RNA
attgctccttacgaggagacccaggtcttccacatcc

SEQ ID NO: 2437 - RNA, 37 nt, synthetic construct
  source 1..37: mol_type = other RNA
attgctccttacgaggagaccccaggtcttccacatc

SEQ ID NO: 2438 - RNA, 37 nt, synthetic construct
  source 1..37: mol_type = other RNA
attgctccttacgaggagacctcggaagacacagctg

SEQ ID NO: 2439 - RNA, 37 nt, synthetic construct
  source 1..37: mol_type = other RNA
attgctccttacgaggagacggtcccgaacagcaggg

SEQ ID NO: 2440 - RNA, 37 nt, synthetic construct
  source 1..37: mol_type = other RNA
attgctccttacgaggagacaggtcccgaacagcagg

SEQ ID NO: 2441 - RNA, 37 nt, synthetic construct
  source 1..37: mol_type = other RNA
attgctccttacgaggagactttaggtcccgaacagc

SEQ ID NO: 2442 - RNA, 37 nt, synthetic construct
  source 1..37: mol_type = other RNA
attgctccttacgaggagacctttaggtcccgaacag

SEQ ID NO: 2443 - RNA, 37 nt, synthetic construct
  source 1..37: mol_type = other RNA
attgctccttacgaggagacgggacctaaagaaactg

SEQ ID NO: 2444 - RNA, 37 nt, synthetic construct
  source 1..37: mol_type = other RNA
attgctccttacgaggagacgggaaagcctgggggcc

SEQ ID NO: 2445 - RNA, 37 nt, synthetic construct
  source 1..37: mol_type = other RNA
attgctccttacgaggagacggggaaagcctgggggc

SEQ ID NO: 2446 - RNA, 37 nt, synthetic construct
  source 1..37: mol_type = other RNA
attgctccttacgaggagacccccaaactggtgcgga

SEQ ID NO: 2447 - RNA, 37 nt, synthetic construct
  source 1..37: mol_type = other RNA
attgctccttacgaggagaccccaaactggtgcggat

SEQ ID NO: 2448 - RNA, 37 nt, synthetic construct
  source 1..37: mol_type = other RNA
attgctccttacgaggagacttctcactcagcgcatc

SEQ ID NO: 2449 - RNA, 37 nt, synthetic construct
  source 1..37: mol_type = other RNA
attgctccttacgaggagacagctgggggaaggtggc

SEQ ID NO: 2450 - RNA, 37 nt, synthetic construct
  source 1..37: mol_type = other RNA
attgctccttacgaggagacccccagctgaagtcctt

SEQ ID NO: 2451 - RNA, 37 nt, synthetic construct
  source 1..37: mol_type = other RNA
attgctccttacgaggagaccaaggacttcagctggg

SEQ ID NO: 2452 - RNA, 37 nt, synthetic construct
  source 1..37: mol_type = other RNA
attgctccttacgaggagacccaaggacttcagctgg

SEQ ID NO: 2453 - RNA, 37 nt, synthetic construct
  source 1..37: mol_type = other RNA
attgctccttacgaggagacagggtttccaaggactt

SEQ ID NO: 2454 - RNA, 37 nt, synthetic construct
  source 1..37: mol_type = other RNA
attgctccttacgaggagactaggcacccaggtcagt

SEQ ID NO: 2455 - RNA, 37 nt, synthetic construct
  source 1..37: mol_type = other RNA
attgctccttacgaggagacgtaggcacccaggtcag

SEQ ID NO: 2456 - RNA, 37 nt, synthetic construct
  source 1..37: mol_type = other RNA
attgctccttacgaggagacgctcgctgcatccctgc

SEQ ID NO: 2457 - RNA, 37 nt, synthetic construct
  source 1..37: mol_type = other RNA
attgctccttacgaggagacgcctgagcagggatgca

SEQ ID NO: 2458 - RNA, 37 nt, synthetic construct
  source 1..37: mol_type = other RNA
attgctccttacgaggagactacaataactgcatctg

SEQ ID NO: 2459 - RNA, 37 nt, synthetic construct
  source 1..37: mol_type = other RNA
attgctccttacgaggagacgctcgtgtgcttccgga

SEQ ID NO: 2460 - RNA, 37 nt, synthetic construct
  source 1..37: mol_type = other RNA
attgctccttacgaggagaccggacatggtgtccctc

SEQ ID NO: 2461 - RNA, 37 nt, synthetic construct
  source 1..37: mol_type = other RNA
attgctccttacgaggagacacggctgccggggccca

SEQ ID NO: 2462 - RNA, 37 nt, synthetic construct
  source 1..37: mol_type = other RNA
attgctccttacgaggagacggaggtgtcctcatgtg

SEQ ID NO: 2463 - RNA, 37 nt, synthetic construct
  source 1..37: mol_type = other RNA
attgctccttacgaggagacctggacactgaatggga

SEQ ID NO: 2464 - RNA, 37 nt, synthetic construct
  source 1..37: mol_type = other RNA
attgctccttacgaggagacagtgtccaggaacacct

SEQ ID NO: 2465 - RNA, 37 nt, synthetic construct
  source 1..37: mol_type = other RNA
attgctccttacgaggagaccaggtgttcctggacac

SEQ ID NO: 2466 - RNA, 37 nt, synthetic construct
  source 1..37: mol_type = other RNA
attgctccttacgaggagacttgcaggtgttcctgga

SEQ ID NO: 2467 - RNA, 37 nt, synthetic construct
  source 1..37: mol_type = other RNA
attgctccttacgaggagacacggatcagcctgagat

SEQ ID NO: 2468 - protein, 772 aa, synthetic construct
MSNTAVSTREHMSNKTTPPSPLSLLLRAHFPGLKFESQDYKIAGKKLRDGGPEAVISYLTGKGQAKLKDVKPPAKAFVIAQSRPFIEWDLVRVSRQIQEKIFGIPATKGRPKQDGLSETAFNEAVASLEVDGKSKLNEETRAAFYEVLGLDAPSLHAQAQNALIKSAISIREGVLKKVENRNEKNLSKTKRRKEAGEEATFVEEKAHDERGYLIHPPGVNQTIPGYQAVVIKSCPSDFIGLPSGCLAKESAEALTDYLPHDRMTIPKGQPGYVPEWQHPLLNRRKNRRRRDWYSASLNKPKATCSKRSGTPNRKNSRTDQIQSGRFKGAIPVLMRFQDEWVIIDIRGLLRNARYRKLLKEKSTIPDLLSLFTGDPSIDMRQGVCTFIYKAGQACSAKMVKTKNAPEILSELTKSGPVVLVSIDLGQTNPIAAKVSRVTQLSDGQLSHETLLRELLSNDSSDGKEIARYRVASDRLRDKLANLAVERLSPEHKSEILRAKNDTPALCKARVCAALGLNPEMIAWDKMTPYTEFLATAYLEKGGDRKVATLKPKNRPEMLRRDIKFKGTEGVRIEVSPEAAEAYREAQWDLQRTSPEYLRLSTWKQELTKRILNQLRHKAAKSSQCEVVVMAFEDLNIKMMHGNGKWADGGWDAFFIKKRENRWFMQAFHKSLTELGAHKGVPTIEVTPHRTSITCTKCGHCDKANRDGERFACQKCGFVAHADLEIATDNIERVALTGKPMPKPESERSGDAKKSVGARKAAFKPEEDAEAAE

SEQ ID NO: 2469 - RNA, 36 nt, synthetic construct
  source 1..36: mol_type = other RNA
ctttcaagactaatagattgctccttacgaggagac

SEQ ID NO: 2470 - RNA, 20 nt, synthetic construct
  source 1..20: mol_type = other RNA
tcccacagatatccagaacc

SEQ ID NO: 2471 - RNA, 20 nt, synthetic construct
  source 1..20: mol_type = other RNA
agagtctctcagctggtaca

SEQ ID NO: 2472 - RNA, 20 nt, synthetic construct
  source 1..20: mol_type = other RNA
aagtccatagacctcatgtc

SEQ ID NO: 2473 - RNA, 20 nt, synthetic construct
  source 1..20: mol_type = other RNA
aagagcaacagtgctgtggc

SEQ ID NO: 2474 - RNA, 20 nt, synthetic construct
  source 1..20: mol_type = other RNA
gttgctccaggccacagcac

SEQ ID NO: 2475 - RNA, 20 nt, synthetic construct
  source 1..20: mol_type = other RNA
gcacatgcaaagtcagattt

SEQ ID NO: 2476 - RNA, 20 nt, synthetic construct
  source 1..20: mol_type = other RNA
gcatgtgcaaacgccttcaa

SEQ ID NO: 2477 - RNA, 20 nt, synthetic construct
  source 1..20: mol_type = other RNA
ctaaaaggaaaaacagacat

SEQ ID NO: 2478 - RNA, 20 nt, synthetic construct
  source 1..20: mol_type = other RNA
ctcgaccagcttgacatcac

SEQ ID NO: 2479 - RNA, 20 nt, synthetic construct
  source 1..20: mol_type = other RNA
atataagtggaggcgtcgcg

SEQ ID NO: 2480 - RNA, 20 nt, synthetic construct
  source 1..20: mol_type = other RNA
tggcctggaggctatccagc

SEQ ID NO: 2481 - RNA, 20 nt, synthetic construct
  source 1..20: mol_type = other RNA
aagttgacttactgaagaat

SEQ ID NO: 2482 - RNA, 20 nt, synthetic construct
  source 1..20: mol_type = other RNA
agcaaggactggtctttcta

SEQ ID NO: 2483 - RNA, 20 nt, synthetic construct
  source 1..20: mol_type = other RNA
agtgggggtgaattcagtgt

SEQ ID NO: 2484 - RNA, 20 nt, synthetic construct
  source 1..20: mol_type = other RNA
ggctgtgacaaagtcacatg

SEQ ID NO: 2485 - RNA, 20 nt, synthetic construct
  source 1..20: mol_type = other RNA
gtcacagcccaagatagtta

SEQ ID NO: 2486 - RNA, 20 nt, synthetic construct
  source 1..20: mol_type = other RNA
tcacagcccaagatagttaa

SEQ ID NO: 2487 - RNA, 40 nt, synthetic construct
  source 1..40: mol_type = other RNA
aggaatacatggtacacgttaggaatacatggtacacgtt

SEQ ID NO: 2488 - RNA, 37 nt, synthetic construct
  source 1..37: mol_type = other RNA
attgctccttacgaggagacagcaaggactggtcttt

SEQ ID NO: 2489 - protein, 8 aa, synthetic construct
  VARIANT 4: note = X can be W or F or Y
  VARIANT 3: note = X can be any amino acid
  VARIANT 5..6: note = X can be any amino acid
KRXXXXAF

SEQ ID NO: 2490 - protein, 6 aa, synthetic construct
  VARIANT 5: note = X can be K or R
  VARIANT 6: note = X can be W or F or Y
LGKRXX

SEQ ID NO: 2491 - DNA, 38 bp, synthetic construct
  source 1..38: mol_type = other DNA
nnnycnransnmyywwynattgcycvdywcghbgrgac

SEQ ID NO: 2492 - DNA, 37 bp, synthetic construct
  source 1..37: mol_type = other DNA
ggatcaaacgatcattgattgcccattacgatgggac

SEQ ID NO: 2493 - DNA, 37 bp, synthetic construct
  source 1..37: mol_type = other DNA
ggaccgatggccttacgattgctccactcgccgagac

SEQ ID NO: 2494 - DNA, 37 bp, synthetic construct
  source 1..37: mol_type = other DNA
ggaccgatggccttacgattgctcggctcgtggagac

SEQ ID NO: 2495 - DNA, 64 bp, synthetic construct
  source 1..64: mol_type = other DNA
acatgtttgtattaaatactcgtattgctgttcgattatgaccgaattccctgtcgtgccagct

SEQ ID NO: 2496 - DNA, 65 bp, synthetic construct
  source 1..65: mol_type = other DNA
gacatgtttgtattaaatactcgtattgctgttcgattatgaccgaattccctgtcgtgccagct

SEQ ID NO: 2497 - DNA, 65 bp, synthetic construct
  source 1..65: mol_type = other DNA
acangnttntattaaatactcgtatngcngnaangattatgaccgaattccctgtcgtgccagct

SEQ ID NO: 2498 - DNA, 64 bp, synthetic construct
  source 1..64: mol_type = other DNA
gacatgtttgtattaaatacttgnnggctgttcgattatgaccgaattccctgtcgtgccagct

SEQ ID NO: 2499 - DNA, 64 bp, synthetic construct
  source 1..64: mol_type = other DNA
acatgtttctattaaatactcgtattgctgttcgattatgaccgaattccctgtcgtgccagct

SEQ ID NO: 2500 - DNA, 64 bp, synthetic construct
  source 1..64: mol_type = other DNA
acatgtttgtattaaatactngtattgctgttcgattatgaccgaattccctgtcgtgccngct

SEQ ID NO: 2501 - DNA, 65 bp, synthetic construct
  source 1..65: mol_type = other DNA
acatgtttgtattaaatactcgtattgctgttcgattatgaccgaattccctgtcgtgcccngct

SEQ ID NO: 2502 - RNA, 36 nt, synthetic construct
  source 1..36: mol_type = other RNA
gggggaacgctcaacgattgcccctcacgaggggac

SEQ ID NO: 2503 - RNA, 37 nt, synthetic construct
  source 1..37: mol_type = other RNA
gctggggaccgatcctgattgctcgctgcggcgagac

SEQ ID NO: 2504 - RNA, 37 nt, synthetic construct
  source 1..37: mol_type = other RNA
nnynnnannnnnnnnnrattgcycnntrcgnngrgac

SEQ ID NO: 2505 - RNA, 36 nt, synthetic construct
  source 1..36: mol_type = other RNA
nyynnrannnnnnnngattgcycnntncgnngrgac

SEQ ID NO: 2506 - DNA, 40 bp, synthetic construct
  source 1..40: mol_type = other DNA
ataggaagagtacgcgttttagaagagcagcttgttaagg

SEQ ID NO: 2507 - DNA, 24 bp, synthetic construct
  source 1..24: mol_type = other DNA
ataggaagagtacgcttgttaagg

SEQ ID NO: 2508 - DNA, 22 bp, synthetic construct
  source 1..22: mol_type = other DNA
ataggaagagtacgcgttaagg

SEQ ID NO: 2509 - DNA, 26 bp, synthetic construct
  source 1..26: mol_type = other DNA
ataggaagagtacgcgtttgttaagg

SEQ ID NO: 2510 - DNA, 26 bp, synthetic construct
  source 1..26: mol_type = other DNA
ataggaagagtacgcgcttgttaagg

SEQ ID NO: 2511 - DNA, 22 bp, synthetic construct
  source 1..22: mol_type = other DNA
ataggaagagtacttgttaagg

SEQ ID NO: 2512 - DNA, 23 bp, synthetic construct
  source 1..23: mol_type = other DNA
ataggaagagtacgcgtttaagg

SEQ ID NO: 2513 - DNA, 35 bp, synthetic construct
  source 1..35: mol_type = other DNA
ataggaagagtacgcgttttagaagcttgttaagg

SEQ ID NO: 2514 - DNA, 37 bp, synthetic construct
  source 1..37: mol_type = other DNA
ataggaagagtacgcgttttagagcagcttgttaagg

SEQ ID NO: 2515 - DNA, 30 bp, synthetic construct
  source 1..30: mol_type = other DNA
ataggaagagtacgcgtttgcttgttaagg

SEQ ID NO: 2516 - DNA, 40 bp, synthetic construct
  source 1..40: mol_type = other DNA
ttgaggaatacatggtacacgttgaagaacattttcagct

SEQ ID NO: 2517 - DNA, 21 bp, synthetic construct
  source 1..21: mol_type = other DNA
ttgaggaatacattttcagct

SEQ ID NO: 2518 - DNA, 19 bp, synthetic construct
  source 1..19: mol_type = other DNA
ttgaggaacattttcagct

SEQ ID NO: 2519 - DNA, 10 bp, synthetic construct
  source 1..10: mol_type = other DNA
attttcagct

SEQ ID NO: 2520 - DNA, 15 bp, synthetic construct
  source 1..15: mol_type = other DNA
ttgaggaatacagct

SEQ ID NO: 2521 - DNA, 40 bp, synthetic construct
  source 1..40: mol_type = other DNA
tcgaggcctacatggtacacgttgaagaacattttcagct

SEQ ID NO: 2522 - DNA, 11 bp, synthetic construct
  source 1..11: mol_type = other DNA
ttgaggaatac

SEQ ID NO: 2523 - DNA, 18 bp, synthetic construct
  source 1..18: mol_type = other DNA
ttgagaacattttcagct

SEQ ID NO: 2524 - DNA, 34 bp, synthetic construct
  source 1..34: mol_type = other DNA
ttgaggaatacatggttgaagaacattttcagct

SEQ ID NO: 2525 - DNA, 14 bp, synthetic construct
  source 1..14: mol_type = other DNA
ttacattttcagct

SEQ ID NO: 2526 - RNA, 40 nt, synthetic construct
  source 1..40: mol_type = other RNA
ttcgggccgagatgtctcgctccgtggccttagctgtgct

SEQ ID NO: 2527 - RNA, 36 nt, synthetic construct
  source 1..36: mol_type = other RNA
ttcgggccgagatgtctccgtggccttagctgtgct

SEQ ID NO: 2528 - RNA, 35 nt, synthetic construct
  source 1..35: mol_type = other RNA
ttcgggccgagatgtctcgtggccttagctgtgct

SEQ ID NO: 2529 - DNA, 40 bp, synthetic construct
  source 1..40: mol_type = other DNA
agaaccctgaccctgccgtgtaccagctgagagactctaa

SEQ ID NO: 2530 - DNA, 38 bp, synthetic construct
  source 1..38: mol_type = other DNA
agaaccctgaccctgccgtaccagctgagagactctaa

SEQ ID NO: 2531 - DNA, 40 bp, synthetic construct
  source 1..40: mol_type = other DNA
agaaccctgaccctgccttgtaccagctgagagactctaa

SEQ ID NO: 2532 - DNA, 33 bp, synthetic construct
  source 1..33: mol_type = other DNA
agaaccctgaccctgccagctgagagactctaa

SEQ ID NO: 2533 - DNA, 26 bp, synthetic construct
  source 1..26: mol_type = other DNA
agaaccctgaccctgagagactctaa

SEQ ID NO: 2534 - DNA, 33 bp, synthetic construct
  source 1..33: mol_type = other DNA
agaaccctgaccctaccagctgagagactctaa

SEQ ID NO: 2535 - DNA, 39 bp, synthetic construct
  source 1..39: mol_type = other DNA
agaaccctgaccctgccgtgtccagctgagagactctaa

SEQ ID NO: 2536 - DNA, 40 bp, synthetic construct
  source 1..40: mol_type = other DNA
agaaccctgaccctgccgtgtccgtgtaccagctgagaga

SEQ ID NO: 2537 - DNA, 35 bp, synthetic construct
  source 1..35: mol_type = other DNA
agaaccctgaccctgtaccagctgagagactctaa

SEQ ID NO: 2538 - DNA, 20 bp, synthetic construct
  source 1..20: mol_type = other DNA
agaaccctgaccctgccgtg

SEQ ID NO: 2539 - DNA, 40 bp, synthetic construct
  source 1..40: mol_type = other DNA
agcctgaccctgccgccgtgtaccagctgagagactctaa

SEQ ID NO: 2540 - DNA, 37 bp, synthetic construct
  source 1..37: mol_type = other DNA
agaaccctgaccctgtgtaccagctgagagactctaa

SEQ ID NO: 2541 - DNA, 40 bp, synthetic construct
  source 1..40: mol_type = other DNA
agaaccctgaccctgccgtgtaacagctgagagactctaa

SEQ ID NO: 2542 - DNA, 34 bp, synthetic construct
  source 1..34: mol_type = other DNA
agaaccctgaccctgccgtgctgagagactctaa

SEQ ID NO: 2543 - DNA, 40 bp, synthetic construct
  source 1..40: mol_type = other DNA
agaaccctgaccctgccgtgtaccgtgtaccagctgagag

SEQ ID NO: 2544 - DNA, 35 bp, synthetic construct
  source 1..35: mol_type = other DNA
agaaccctgaccctgccgtgtctgagagactctaa

SEQ ID NO: 2545 - DNA, 40 bp, synthetic construct
  source 1..40: mol_type = other DNA
cagacaaaactgtgctagacatgaggtctatggacttcaa

SEQ ID NO: 2546 - DNA, 39 bp, synthetic construct
  source 1..39: mol_type = other DNA
cagacaaaactgtgctagacatgaggtctatggacttaa

SEQ ID NO: 2547 - DNA, 35 bp, synthetic construct
  source 1..35: mol_type = other DNA
cagacaaaactgtgcttgaggtctatggacttcaa

SEQ ID NO: 2548 - DNA, 35 bp, synthetic construct
  source 1..35: mol_type = other DNA
cagacaaaactgtgctagaggtctatggacttcaa

SEQ ID NO: 2549 - DNA, 39 bp, synthetic construct
  source 1..39: mol_type = other DNA
cagacaaaactgtgctagacatgaggtctatggacttca

SEQ ID NO: 2550 - DNA, 38 bp, synthetic construct
  source 1..38: mol_type = other DNA
cagacaaaactgtgctacatgaggtctatggacttcaa

SEQ ID NO: 2551 - DNA, 33 bp, synthetic construct
  source 1..33: mol_type = other DNA
cagacaaaactgtgctaggtctatggacttcaa

SEQ ID NO: 2552 - DNA, 40 bp, synthetic construct
  source 1..40: mol_type = other DNA
cagacaaaactgtgctagacatgaggtctatggtcttcaa

SEQ ID NO: 2553 - DNA, 36 bp, synthetic construct
  source 1..36: mol_type = other DNA
cagacaaaactgtgctaygaggtctatggacttcaa

SEQ ID NO: 2554 - DNA, 37 bp, synthetic construct
  source 1..37: mol_type = other DNA
cagacaaaactgtgctagacatgtctatggacttcaa

SEQ ID NO: 2555 - DNA, 35 bp, synthetic construct
  source 1..35: mol_type = other DNA
cagacaaaactgtgctagacgtctatggacttcaa

SEQ ID NO: 2556 - DNA, 40 bp, synthetic construct
  source 1..40: mol_type = other DNA
cagacaaaactgtgctagactagacatgaggtctatggac

SEQ ID NO: 2557 - DNA, 39 bp, synthetic construct
  source 1..39: mol_type = other DNA
cagacaaaactgtgctagacatgaggtctatggactcaa

SEQ ID NO: 2558 - DNA, 40 bp, synthetic construct
  source 1..40: mol_type = other DNA
agacaaaactgtgcgtagacatgaggtctatggacttcaa

SEQ ID NO: 2559 - DNA, 40 bp, synthetic construct
  source 1..40: mol_type = other DNA
cagacaaaactgtgctagacatgaggtctatggactttca

SEQ ID NO: 2560 - DNA, 23 bp, synthetic construct
  source 1..23: mol_type = other DNA
gtcagacgcactgacaaagtngg

SEQ ID NO: 2561 - DNA, 23 bp, synthetic construct
  source 1..23: mol_type = other DNA
gtcagacacactgaggaactngg

SEQ ID NO: 2562 - DNA, 23 bp, synthetic construct
  source 1..23: mol_type = other DNA
gacagatggactgacatagtngg

SEQ ID NO: 2563 - DNA, 23 bp, synthetic construct
  source 1..23: mol_type = other DNA
gtcagagacaatgaaaaagtngg

SEQ ID NO: 2564 - DNA, 23 bp, synthetic construct
  source 1..23: mol_type = other DNA
ggcagagacactgaaaaagtngg

SEQ ID NO: 2565 - DNA, 23 bp, synthetic construct
  source 1..23: mol_type = other DNA
gtactatgcactgacaaagtngg

SEQ ID NO: 2566 - DNA, 23 bp, synthetic construct
  source 1..23: mol_type = other DNA
gtcacatgcacggacagagtngg

SEQ ID NO: 2567 - DNA, 23 bp, synthetic construct
  source 1..23: mol_type = other DNA
gtcaaaagcactgacaaggtngg

SEQ ID NO: 2568 - DNA, 23 bp, synthetic construct
  source 1..23: mol_type = other DNA
gtcacaccctctaacaaagtngg

SEQ ID NO: 2569 - DNA, 23 bp, synthetic construct
  source 1..23: mol_type = other DNA
gtcagacccactcagaaattngg

SEQ ID NO: 2570 - DNA, 23 bp, synthetic construct
  source 1..23: mol_type = other DNA
atcagacacaaagacaaagtngg

SEQ ID NO: 2571 - DNA, 23 bp, synthetic construct
  source 1..23: mol_type = other DNA
gtctgaggcagtgacaaattngg

SEQ ID NO: 2572 - DNA, 23 bp, synthetic construct
  source 1..23: mol_type = other DNA
gtcagaggcacatacaaaatngg

SEQ ID NO: 2573 - DNA, 23 bp, synthetic construct
  source 1..23: mol_type = other DNA
gtcagacagacagacaaactngg

SEQ ID NO: 2574 - DNA, 23 bp, synthetic construct
  source 1..23: mol_type = other DNA
ctcagaaacactgataaagtngg

SEQ ID NO: 2575 - DNA, 23 bp, synthetic construct
  source 1..23: mol_type = other DNA
ttcagaagaactgagaaagtngg

SEQ ID NO: 2576 - DNA, 23 bp, synthetic construct
  source 1..23: mol_type = other DNA
gttagaagccctgataaagtngg

SEQ ID NO: 2577 - DNA, 23 bp, synthetic construct
  source 1..23: mol_type = other DNA
ttcagacacactaagaaagtngg

SEQ ID NO: 2578 - DNA, 23 bp, synthetic construct
  source 1..23: mol_type = other DNA
gagagacacactgacatagtngg

SEQ ID NO: 2579 - DNA, 23 bp, synthetic construct
  source 1..23: mol_type = other DNA
ggcacactcactgacaaggtngg

SEQ ID NO: 2580 - DNA, 23 bp, synthetic construct
  source 1..23: mol_type = other DNA
gtcaggctcactggcaaagangg

SEQ ID NO: 2581 - DNA, 23 bp, synthetic construct
  source 1..23: mol_type = other DNA
tacagatacacagtcaaagcngg

SEQ ID NO: 2582 - DNA, 23 bp, synthetic construct
  source 1..23: mol_type = other DNA
gtcagacacacggacaaggcngg

SEQ ID NO: 2583 - DNA, 23 bp, synthetic construct
  source 1..23: mol_type = other DNA
gtgaggctcactgacaaagangg

SEQ ID NO: 2584 - DNA, 23 bp, synthetic construct
  source 1..23: mol_type = other DNA
gacagaatcacagacaaagtngg

SEQ ID NO: 2585 - DNA, 23 bp, synthetic construct
  source 1..23: mol_type = other DNA
gtcaggagcactggcaaactngg

SEQ ID NO: 2586 - DNA, 23 bp, synthetic construct
  source 1..23: mol_type = other DNA
ctcagacggactggcatagtngg

SEQ ID NO: 2587 - DNA, 23 bp, synthetic construct
  source 1..23: mol_type = other DNA
gtctgacaccctgacaaactngg

SEQ ID NO: 2588 - DNA, 23 bp, synthetic construct
  source 1..23: mol_type = other DNA
gacagcatcactgacaaagtngg

SEQ ID NO: 2589 - DNA, 23 bp, synthetic construct
  source 1..23: mol_type = other DNA
gtcaaatgcactgacgaggtngg

SEQ ID NO: 2590 - DNA, 23 bp, synthetic construct
  source 1..23: mol_type = other DNA
gcccgacgcactgagaaagtngg

SEQ ID NO: 2591 - DNA, 23 bp, synthetic construct
  source 1..23: mol_type = other DNA
atcagactcactgacataatngg

SEQ ID NO: 2592 - DNA, 24 bp, synthetic construct
  source 1..24: mol_type = other DNA
nnnnaggaatacatggtacacgtt

SEQ ID NO: 2593 - DNA, 24 bp, synthetic construct
  source 1..24: mol_type = other DNA
nnnnaagaaaacatggaaaacgtt

SEQ ID NO: 2594 - DNA, 24 bp, synthetic construct
  source 1..24: mol_type = other DNA
nnnnaggaatacatggcaatcatt

SEQ ID NO: 2595 - DNA, 24 bp, synthetic construct
  source 1..24: mol_type = other DNA
nnnnattaatacatagtacacatt

SEQ ID NO: 2596 - DNA, 24 bp, synthetic construct
  source 1..24: mol_type = other DNA
nnnnagtaatgcatgttacacgtt

SEQ ID NO: 2597 - DNA, 24 bp, synthetic construct
  source 1..24: mol_type = other DNA
nnnnaggaatacagattacacctt

SEQ ID NO: 2598 - DNA, 24 bp, synthetic construct
  source 1..24: mol_type = other DNA
nnnnaagaatatatggtacacata

SEQ ID NO: 2599 - DNA, 24 bp, synthetic construct
  source 1..24: mol_type = other DNA
nnnnaggaaaacatgaaacacctt

SEQ ID NO: 2600 - DNA, 24 bp, synthetic construct
  source 1..24: mol_type = other DNA
nnnnaggaatacaaggttcaactt

SEQ ID NO: 2601 - DNA, 24 bp, synthetic construct
  source 1..24: mol_type = other DNA
nnnnaggaatacatgatacaagag

SEQ ID NO: 2602 - DNA, 24 bp, synthetic construct
  source 1..24: mol_type = other DNA
nnnngggaatacatgataaatgtt

SEQ ID NO: 2603 - DNA, 24 bp, synthetic construct
  source 1..24: mol_type = other DNA
nnnnaggaaaagatgggacacttt

SEQ ID NO: 2604 - DNA, 24 bp, synthetic construct
  source 1..24: mol_type = other DNA
nnnngggaatacatggcacacatg

SEQ ID NO: 2605 - DNA, 24 bp, synthetic construct
  source 1..24: mol_type = other DNA
nnnnagtaacacatggtataggtt

SEQ ID NO: 2606 - DNA, 24 bp, synthetic construct
  source 1..24: mol_type = other DNA
nnnnagaaatacatggtatccttt

SEQ ID NO: 2607 - DNA, 24 bp, synthetic construct
  source 1..24: mol_type = other DNA
nnnnaggaatacaaattacacgtg

SEQ ID NO: 2608 - DNA, 24 bp, synthetic construct
  source 1..24: mol_type = other DNA
nnnngggaatacattgttcacgtt

SEQ ID NO: 2609 - DNA, 24 bp, synthetic construct
  source 1..24: mol_type = other DNA
nnnnagaaatacattgtaatcgtt

SEQ ID NO: 2610 - DNA, 24 bp, synthetic construct
  source 1..24: mol_type = other DNA
nnnnaggaatagatgctaaaggtt

SEQ ID NO: 2611 - DNA, 24 bp, synthetic construct
  source 1..24: mol_type = other DNA
nnnnaggaatacatggtgatcatt

SEQ ID NO: 2612 - DNA, 24 bp, synthetic construct
  source 1..24: mol_type = other DNA
nnnnaggaatacattgtaatcatt

SEQ ID NO: 2613 - DNA, 24 bp, synthetic construct
  source 1..24: mol_type = other DNA
nnnnagtaatatatggtagacatt

SEQ ID NO: 2614 - DNA, 24 bp, synthetic construct
  source 1..24: mol_type = other DNA
nnnnaggaattcctgctacacatt

SEQ ID NO: 2615 - DNA, 24 bp, synthetic construct
  source 1..24: mol_type = other DNA
nnnnaggcagacatggtacacact

SEQ ID NO: 2616 - DNA, 24 bp, synthetic construct
  source 1..24: mol_type = other DNA
nnnnaggaaaacatgttaaaggtt

SEQ ID NO: 2617 - DNA, 24 bp, synthetic construct
  source 1..24: mol_type = other DNA
nnnnaggactacatggtattcttt

SEQ ID NO: 2618 - DNA, 24 bp, synthetic construct
  source 1..24: mol_type = other DNA
nnnnaggaatacaggcaacatgtt

SEQ ID NO: 2619 - DNA, 24 bp, synthetic construct
  source 1..24: mol_type = other DNA
nnnnctgaatacatggtacatgta

SEQ ID NO: 2620 - DNA, 24 bp, synthetic construct
  source 1..24: mol_type = other DNA
nnnnaggaatgtatagttcacgtt

SEQ ID NO: 2621 - DNA, 24 bp, synthetic construct
  source 1..24: mol_type = other DNA
nnnnaggtatcaatggtacatgtt

SEQ ID NO: 2622 - DNA, 24 bp, synthetic construct
  source 1..24: mol_type = other DNA
nnnnagcaatgcatagtacacatt

SEQ ID NO: 2623 - DNA, 24 bp, synthetic construct
  source 1..24: mol_type = other DNA
nnnnaggaatacatggtaataatt

SEQ ID NO: 2624 - DNA, 24 bp, synthetic construct
  source 1..24: mol_type = other DNA
nnnnctagcaaactggtgctcaag

SEQ ID NO: 2625 - DNA, 24 bp, synthetic construct
  source 1..24: mol_type = other DNA
nnnnctagcaacctgttgctaaac

SEQ ID NO: 2626 - DNA, 24 bp, synthetic construct
  source 1..24: mol_type = other DNA
nnnntgagaaaactggtgctaaag

SEQ ID NO: 2627 - DNA, 24 bp, synthetic construct
  source 1..24: mol_type = other DNA
nnnnctaactaattggtgctcaat

SEQ ID NO: 2628 - DNA, 24 bp, synthetic construct
  source 1..24: mol_type = other DNA
nnnnctagcacaatggtggccaag

SEQ ID NO: 2629 - DNA, 24 bp, synthetic construct
  source 1..24: mol_type = other DNA
nnnnctatcaaagtggtgctttag

SEQ ID NO: 2630 - DNA, 24 bp, synthetic construct
  source 1..24: mol_type = other DNA
nnnnctgggaaattggtgctaaag

SEQ ID NO: 2631 - DNA, 24 bp, synthetic construct
  source 1..24: mol_type = other DNA
nnnnttgggaaactggtgctcaaa

SEQ ID NO: 2632 - DNA, 24 bp, synthetic construct
  source 1..24: mol_type = other DNA
nnnnctagcaaactggtgttgagg

SEQ ID NO: 2633 - DNA, 24 bp, synthetic construct
  source 1..24: mol_type = other DNA
nnnnctagcaaactgatgatcact

SEQ ID NO: 2634 - DNA, 24 bp, synthetic construct
  source 1..24: mol_type = other DNA
nnnnctatcaaactggggctcaca

SEQ ID NO: 2635 - DNA, 24 bp, synthetic construct
  source 1..24: mol_type = other DNA
nnnnccaacacactggtgctccag

SEQ ID NO: 2636 - DNA, 24 bp, synthetic construct
  source 1..24: mol_type = other DNA
nnnngcagcaatctggtgctcagg

SEQ ID NO: 2637 - DNA, 24 bp, synthetic construct
  source 1..24: mol_type = other DNA
nnnnttagcaagctggttgtcaag

SEQ ID NO: 2638 - DNA, 24 bp, synthetic construct
  source 1..24: mol_type = other DNA
nnnnttagcaaactgtttctcaag

SEQ ID NO: 2639 - DNA, 24 bp, synthetic construct
  source 1..24: mol_type = other DNA
nnnnctagcgaaatggttttcaag

SEQ ID NO: 2640 - DNA, 24 bp, synthetic construct
  source 1..24: mol_type = other DNA
nnnnctggcaagctggggctcaag

SEQ ID NO: 2641 - DNA, 24 bp, synthetic construct
  source 1..24: mol_type = other DNA
nnnnttagcatactggtgctccag

SEQ ID NO: 2642 - DNA, 24 bp, synthetic construct
  source 1..24: mol_type = other DNA
nnnncaagcaaagtggtgtacaag

SEQ ID NO: 2643 - DNA, 24 bp, synthetic construct
  source 1..24: mol_type = other DNA
nnnngtagcaatctggttctctag

SEQ ID NO: 2644 - DNA, 24 bp, synthetic construct
  source 1..24: mol_type = other DNA
nnnnctagcagtctgctgctgaag

SEQ ID NO: 2645 - DNA, 24 bp, synthetic construct
  source 1..24: mol_type = other DNA
nnnnctagttaactggtgctcagt

SEQ ID NO: 2646 - DNA, 24 bp, synthetic construct
  source 1..24: mol_type = other DNA
nnnntttgcaaagttgtgctcaag

SEQ ID NO: 2647 - DNA, 24 bp, synthetic construct
  source 1..24: mol_type = other DNA
nnnnctagaacagtggtgctcaac

SEQ ID NO: 2648 - DNA, 24 bp, synthetic construct
  source 1..24: mol_type = other DNA
nnnnctgccaaactggagctcaat

SEQ ID NO: 2649 - DNA, 24 bp, synthetic construct
  source 1..24: mol_type = other DNA
nnnntgagcaaacagatgctcaag

SEQ ID NO: 2650 - DNA, 24 bp, synthetic construct
  source 1..24: mol_type = other DNA
nnnnccaccaagctggtgatcaag

SEQ ID NO: 2651 - DNA, 24 bp, synthetic construct
  source 1..24: mol_type = other DNA
nnnnctaccatactggggctcagg

SEQ ID NO: 2652 - DNA, 24 bp, synthetic construct
  source 1..24: mol_type = other DNA
nnnnccaggaaactggggctcaaa

SEQ ID NO: 2653 - DNA, 24 bp, synthetic construct
  source 1..24: mol_type = other DNA
nnnngaagcaaactggagttcaag

SEQ ID NO: 2654 - DNA, 24 bp, synthetic construct
  source 1..24: mol_type = other DNA
nnnnattgcaaactggagctccag

SEQ ID NO: 2655 - DNA, 24 bp, synthetic construct
  source 1..24: mol_type = other DNA
nnnnatggcaaactgctgctctag

SEQ ID NO: 2656 - DNA, 24 bp, synthetic construct
  source 1..24: mol_type = other DNA
nnnnctatcaaactgtttttcaag

SEQ ID NO: 2657 - DNA, 23 bp, synthetic construct
  source 1..23: mol_type = other DNA
gctgatggcaacttcaactgngg

SEQ ID NO: 2658 - DNA, 23 bp, synthetic construct
  source 1..23: mol_type = other DNA
cctgatggcaacatagactgngg

SEQ ID NO: 2659 - DNA, 23 bp, synthetic construct
  source 1..23: mol_type = other DNA
gcttatggcaacttcacctcngg

SEQ ID NO: 2660 - DNA, 23 bp, synthetic construct
  source 1..23: mol_type = other DNA
gctgagggccacttcgactgngg

SEQ ID NO: 2661 - DNA, 23 bp, synthetic construct
  source 1..23: mol_type = other DNA
gatgatgacaacatcaactgngg

SEQ ID NO: 2662 - DNA, 23 bp, synthetic construct
  source 1..23: mol_type = other DNA
gctgctggcaacttcaggggngg

SEQ ID NO: 2663 - DNA, 23 bp, synthetic construct
  source 1..23: mol_type = other DNA
gctgaaggcaatttcgactgngg

SEQ ID NO: 2664 - DNA, 23 bp, synthetic construct
  source 1..23: mol_type = other DNA
gctgaagacaacttctactangg

SEQ ID NO: 2665 - DNA, 23 bp, synthetic construct
  source 1..23: mol_type = other DNA
gctgctggcaacttcaagggngg

SEQ ID NO: 2666 - DNA, 23 bp, synthetic construct
  source 1..23: mol_type = other DNA
gctgatagcaacttcaagggngg

SEQ ID NO: 2667 - DNA, 23 bp, synthetic construct
  source 1..23: mol_type = other DNA
gctgctggcaacttcaggtgngg

SEQ ID NO: 2668 - DNA, 23 bp, synthetic construct
  source 1..23: mol_type = other DNA
gctgctggcaacttcagcggngg

SEQ ID NO: 2669 - DNA, 23 bp, synthetic construct
  source 1..23: mol_type = other DNA
gttgaaggcaatttcgactgngg

SEQ ID NO: 2670 - DNA, 23 bp, synthetic construct
  source 1..23: mol_type = other DNA
gcagatggcaacctcacctgngg

SEQ ID NO: 2671 - DNA, 23 bp, synthetic construct
  source 1..23: mol_type = other DNA
gctgaaggcatcctcaagtgngg

SEQ ID NO: 2672 - DNA, 23 bp, synthetic construct
  source 1..23: mol_type = other DNA
cctgatgtcaacttcaattgngg

SEQ ID NO: 2673 - DNA, 23 bp, synthetic construct
  source 1..23: mol_type = other DNA
ggtgatggcattttcaactgngg

SEQ ID NO: 2674 - DNA, 23 bp, synthetic construct
  source 1..23: mol_type = other DNA
gatgatgccaacttcacctgngg

SEQ ID NO: 2675 - DNA, 23 bp, synthetic construct
  source 1..23: mol_type = other DNA
gctgagggcaatttcgactgngg

SEQ ID NO: 2676 - DNA, 23 bp, synthetic construct
  source 1..23: mol_type = other DNA
gctgagggtgacttcgactgngg

SEQ ID NO: 2677 - DNA, 23 bp, synthetic construct
  source 1..23: mol_type = other DNA
gcagttggcagcttcgactgngg

SEQ ID NO: 2678 - DNA, 23 bp, synthetic construct
  source 1..23: mol_type = other DNA
tctgatggcatcttagactgngg

SEQ ID NO: 2679 - DNA, 23 bp, synthetic construct
  source 1..23: mol_type = other DNA
tctggtggcatcttcatctgngg

SEQ ID NO: 2680 - DNA, 23 bp, synthetic construct
  source 1..23: mol_type = other DNA
gcttatgccaactacaaatgngg

SEQ ID NO: 2681 - DNA, 23 bp, synthetic construct
  source 1..23: mol_type = other DNA
cctgatggcaccatcaactgngg

SEQ ID NO: 2682 - DNA, 23 bp, synthetic construct
  source 1..23: mol_type = other DNA
gctgatggcaacctcaagtgagg

SEQ ID NO: 2683 - DNA, 23 bp, synthetic construct
  source 1..23: mol_type = other DNA
gctgatggcaactctagctgngg

SEQ ID NO: 2684 - DNA, 23 bp, synthetic construct
  source 1..23: mol_type = other DNA
gctgagggcgatttcgactgngg

SEQ ID NO: 2685 - DNA, 23 bp, synthetic construct
  source 1..23: mol_type = other DNA
tctgatggctgcttcaactgngg

SEQ ID NO: 2686 - DNA, 23 bp, synthetic construct
  source 1..23: mol_type = other DNA
gctgaaggcaacttgaactcngg

SEQ ID NO: 2687 - DNA, 23 bp, synthetic construct
  source 1..23: mol_type = other DNA
agtgattgcaacttgaactgngg

SEQ ID NO: 2688 - DNA, 23 bp, synthetic construct
  source 1..23: mol_type = other DNA
tctgaccccagaacagcaggngg

SEQ ID NO: 2689 - DNA, 23 bp, synthetic construct
  source 1..23: mol_type = other DNA
cctaaccccagaacagcaggngg

SEQ ID NO: 2690 - DNA, 23 bp, synthetic construct
  source 1..23: mol_type = other DNA
acagaccccagaacagcagangg

SEQ ID NO: 2691 - DNA, 23 bp, synthetic construct
  source 1..23: mol_type = other DNA
tataaccccagaacagcacgngg

SEQ ID NO: 2692 - DNA, 23 bp, synthetic construct
  source 1..23: mol_type = other DNA
tctgactccagaacaacagcngg

SEQ ID NO: 2693 - DNA, 23 bp, synthetic construct
  source 1..23: mol_type = other DNA
tgtaaccccagattagcaggngg

SEQ ID NO: 2694 - DNA, 23 bp, synthetic construct
  source 1..23: mol_type = other DNA
cctgatcccagaacaacaggngg

SEQ ID NO: 2695 - DNA, 23 bp, synthetic construct
  source 1..23: mol_type = other DNA
tctgaccagagaacagcaagngg

SEQ ID NO: 2696 - DNA, 23 bp, synthetic construct
  source 1..23: mol_type = other DNA
tctgaacccaggccaccaggngg

SEQ ID NO: 2697 - DNA, 23 bp, synthetic construct
  source 1..23: mol_type = other DNA
tctgactctagaacaggaggngg

SEQ ID NO: 2698 - DNA, 23 bp, synthetic construct
  source 1..23: mol_type = other DNA
actgaccctagaacagcacangg

SEQ ID NO: 2699 - DNA, 23 bp, synthetic construct
  source 1..23: mol_type = other DNA
tctgaccctagaacagaagangg

SEQ ID NO: 2700 - DNA, 23 bp, synthetic construct
  source 1..23: mol_type = other DNA
cctgaccgcagaccagcaggngg

SEQ ID NO: 2701 - DNA, 23 bp, synthetic construct
  source 1..23: mol_type = other DNA
tttgaccccaggacagcagtngg

SEQ ID NO: 2702 - DNA, 23 bp, synthetic construct
  source 1..23: mol_type = other DNA
tctgaccagtgaacagcaggngg

SEQ ID NO: 2703 - DNA, 23 bp, synthetic construct
  source 1..23: mol_type = other DNA
tctgacccaagaacagaagangg

SEQ ID NO: 2704 - DNA, 23 bp, synthetic construct
  source 1..23: mol_type = other DNA
tctgactccagaacagagggngg

SEQ ID NO: 2705 - DNA, 23 bp, synthetic construct
  source 1..23: mol_type = other DNA
tctgaccccagcactgcatgngg

SEQ ID NO: 2706 - DNA, 23 bp, synthetic construct
  source 1..23: mol_type = other DNA
tcataccccagagcagcaggngg

SEQ ID NO: 2707 - DNA, 23 bp, synthetic construct
  source 1..23: mol_type = other DNA
tctctccccagagcagcagangg

SEQ ID NO: 2708 - DNA, 23 bp, synthetic construct
  source 1..23: mol_type = other DNA
tctgagcccagaagagctggngg

SEQ ID NO: 2709 - DNA, 23 bp, synthetic construct
  source 1..23: mol_type = other DNA
cctgaccccagaaaagcagtngg

SEQ ID NO: 2710 - DNA, 23 bp, synthetic construct
  source 1..23: mol_type = other DNA
tctggccccagaagagcaagngg

SEQ ID NO: 2711 - DNA, 23 bp, synthetic construct
  source 1..23: mol_type = other DNA
tctgaccccagtaaagcagtngg

SEQ ID NO: 2712 - DNA, 23 bp, synthetic construct
  source 1..23: mol_type = other DNA
cctgcccccagaacagcagcngg

SEQ ID NO: 2713 - DNA, 23 bp, synthetic construct
  source 1..23: mol_type = other DNA
gctgaccccagtacagcagcngg

SEQ ID NO: 2714 - DNA, 23 bp, synthetic construct
  source 1..23: mol_type = other DNA
tctgcccccagaagagcagcngg

SEQ ID NO: 2715 - DNA, 23 bp, synthetic construct
  source 1..23: mol_type = other DNA
cctgactccagcacagcatgngg

SEQ ID NO: 2716 - DNA, 23 bp, synthetic construct
  source 1..23: mol_type = other DNA
tctgtccccagaactgcagtngg

SEQ ID NO: 2717 - DNA, 23 bp, synthetic construct
  source 1..23: mol_type = other DNA
tctgacccctgaaaagcagangg

SEQ ID NO: 2718 - DNA, 23 bp, synthetic construct
  source 1..23: mol_type = other DNA
tcagaccccagcccagcaggngg

SEQ ID NO: 2719 - DNA, 23 bp, synthetic construct
  source 1..23: mol_type = other DNA
tctgaccgcaggaaggcaggngg

SEQ ID NO: 2720 - DNA, 24 bp, synthetic construct
  source 1..24: mol_type = other DNA
nttnactggagcagctgcagccca

SEQ ID NO: 2721 - DNA, 24 bp, synthetic construct
  source 1..24: mol_type = other DNA
nttnactgaagcagctgcagctgg

SEQ ID NO: 2722 - DNA, 24 bp, synthetic construct
  source 1..24: mol_type = other DNA
nttnactggagctgctgcagctga

SEQ ID NO: 2723 - DNA, 24 bp, synthetic construct
  source 1..24: mol_type = other DNA
nttnactggagcagctgaagcctt

SEQ ID NO: 2724 - DNA, 24 bp, synthetic construct
  source 1..24: mol_type = other DNA
nttnactggagaaactccagcaca

SEQ ID NO: 2725 - DNA, 24 bp, synthetic construct
  source 1..24: mol_type = other DNA
nttnacaggagcagatgtagctca

SEQ ID NO: 2726 - DNA, 24 bp, synthetic construct
  source 1..24: mol_type = other DNA
nttnactctagcatctacagccca

SEQ ID NO: 2727 - DNA, 24 bp, synthetic construct
  source 1..24: mol_type = other DNA
nttntctgaagcagctgcagccag

SEQ ID NO: 2728 - DNA, 24 bp, synthetic construct
  source 1..24: mol_type = other DNA
nttnactggagcagctgcgactca

SEQ ID NO: 2729 - DNA, 24 bp, synthetic construct
  source 1..24: mol_type = other DNA
nttnactgattcagctgcagccca

SEQ ID NO: 2730 - DNA, 24 bp, synthetic construct
  source 1..24: mol_type = other DNA
nttncctgaagcagctgctgccct

SEQ ID NO: 2731 - DNA, 24 bp, synthetic construct
  source 1..24: mol_type = other DNA
nttnactggaacaactgaagccaa

SEQ ID NO: 2732 - DNA, 24 bp, synthetic construct
  source 1..24: mol_type = other DNA
nttnactggagtagctgaagctta

SEQ ID NO: 2733 - DNA, 24 bp, synthetic construct
  source 1..24: mol_type = other DNA
nttncctgaagcagctgcagccag

SEQ ID NO: 2734 - DNA, 24 bp, synthetic construct
  source 1..24: mol_type = other DNA
nttnacagaagcagctgcatccct

SEQ ID NO: 2735 - DNA, 24 bp, synthetic construct
  source 1..24: mol_type = other DNA
nttnaatggtgccactgcagccca

SEQ ID NO: 2736 - DNA, 24 bp, synthetic construct
  source 1..24: mol_type = other DNA
nttnagtgatgcagctgcagccct

SEQ ID NO: 2737 - DNA, 24 bp, synthetic construct
  source 1..24: mol_type = other DNA
nttnactggagtaggttcagccaa

SEQ ID NO: 2738 - DNA, 24 bp, synthetic construct
  source 1..24: mol_type = other DNA
nttnactggagcaggtccatccct

SEQ ID NO: 2739 - DNA, 24 bp, synthetic construct
  source 1..24: mol_type = other DNA
nttngatggagcagctgcagcacc

SEQ ID NO: 2740 - DNA, 24 bp, synthetic construct
  source 1..24: mol_type = other DNA
nttnactggtacaggtgcaggcca

SEQ ID NO: 2741 - DNA, 24 bp, synthetic construct
  source 1..24: mol_type = other DNA
nttnactggagcatgtgtaaccca

SEQ ID NO: 2742 - DNA, 24 bp, synthetic construct
  source 1..24: mol_type = other DNA
nttnactgaagcagctggggacca

SEQ ID NO: 2743 - DNA, 24 bp, synthetic construct
  source 1..24: mol_type = other DNA
nttnactgcagcagctgcagccct

SEQ ID NO: 2744 - DNA, 24 bp, synthetic construct
  source 1..24: mol_type = other DNA
nttnactgcattagctgcagccct

SEQ ID NO: 2745 - DNA, 24 bp, synthetic construct
  source 1..24: mol_type = other DNA
nttntatggagcagcttcagccca

SEQ ID NO: 2746 - DNA, 24 bp, synthetic construct
  source 1..24: mol_type = other DNA
nttntctggagcagctggagcaga

SEQ ID NO: 2747 - DNA, 24 bp, synthetic construct
  source 1..24: mol_type = other DNA
nttnactggagcagctggacctga

SEQ ID NO: 2748 - DNA, 24 bp, synthetic construct
  source 1..24: mol_type = other DNA
nttncctggagcaggtgctgtcca

SEQ ID NO: 2749 - DNA, 24 bp, synthetic construct
  source 1..24: mol_type = other DNA
nttnactggagtagcttcagccct

SEQ ID NO: 2750 - DNA, 24 bp, synthetic construct
  source 1..24: mol_type = other DNA
nttnaatggagaaggtgcagctca

SEQ ID NO: 2751 - DNA, 24 bp, synthetic construct
  source 1..24: mol_type = other DNA
nttntctggagcagcttctgccta

SEQ ID NO: 2752 - DNA, 24 bp, synthetic construct
  source 1..24: mol_type = other DNA
nttnactggggctgctgcaggtca

SEQ ID NO: 2753 - DNA, 24 bp, synthetic construct
  source 1..24: mol_type = other DNA
attggcgctatgctactggtggat

SEQ ID NO: 2754 - DNA, 23 bp, synthetic construct
  source 1..23: mol_type = other DNA
attgatcaggggccagctatagg

SEQ ID NO: 2755 - DNA, 23 bp, synthetic construct
  source 1..23: mol_type = other DNA
actgatcagggcacagctatcgg

SEQ ID NO: 2756 - DNA, 23 bp, synthetic construct
  source 1..23: mol_type = other DNA
gctgatcaggagtcagctctagg

SEQ ID NO: 2757 - DNA, 24 bp, synthetic construct
  source 1..24: mol_type = other DNA
attgatgaggagtcagctatagag

SEQ ID NO: 2758 - DNA, 23 bp, synthetic construct
  source 1..23: mol_type = other DNA
attgaacagggcccagcttttgg

SEQ ID NO: 2759 - RNA, 11 nt, synthetic construct
  source 1..11: mol_type = other RNA
ggtgtgtgggt

SEQ ID NO: 2760 - RNA, 11 nt, synthetic construct
  source 1..11: mol_type = other RNA
ccacacaccca

SEQ ID NO: 2761 - RNA, 11 nt, synthetic construct
  source 1..11: mol_type = other RNA
ccagacaccca

SEQ ID NO: 2762 - RNA, 11 nt, synthetic construct
  source 1..11: mol_type = other RNA
ccacacaggga

SEQ ID NO: 2763 - RNA, 19 nt, synthetic construct
  source 1..19: mol_type = other RNA
ttcgggccttagctgtgct

SEQ ID NO: 2764 - RNA, 18 nt, synthetic construct
  source 1..18: mol_type = other RNA
ttcgggccgagatgtgct

SEQ ID NO: 2765 - RNA, 34 nt, synthetic construct
  source 1..34: mol_type = other RNA
ttcgggccgagatgtccgtggccttagctgtgct

SEQ ID NO: 2766 - RNA, 40 nt, synthetic construct
  source 1..40: mol_type = other RNA
tcggggcgagatgtctcgctccgtggccttagctgtgctc

SEQ ID NO: 2767 - RNA, 40 nt, synthetic construct
  source 1..40: mol_type = other RNA
tcgggccgagatgtctcgcttccgtggccttagctgtgct

SEQ ID NO: 2768 - RNA, 40 nt, synthetic construct
  source 1..40: mol_type = other RNA
tcgggccgagatgtctcgctccctggccttagctgtgctc

SEQ ID NO: 2769 - RNA, 19 nt, synthetic construct
  source 1..19: mol_type = other RNA
tcgggccttagctgtgctc

SEQ ID NO: 2770 - RNA, 35 nt, synthetic construct
  source 1..35: mol_type = other RNA
tcgggccgagatgtctcgtggccttagctgtgctc

SEQ ID NO: 2771 - RNA, 39 nt, synthetic construct
  source 1..39: mol_type = other RNA
tcgggccgagatgtctcgcccgtggccttagctgtgctc

SEQ ID NO: 2772 - RNA, 94 nt, synthetic construct
  source 1..94: mol_type = other RNA
catatgcttaccgtaacttgaaagataggacgaaacaccggctttcaagactaatagattgctccttacgaggagacatctgcaccggcaagct

SEQ ID NO: 2773 - RNA, 47 nt, synthetic construct
  source 1..47: mol_type = other RNA
aatagattgctccttacgaggagacatctgcaccaccggcaagcttt

SEQ ID NO: 2774 - RNA, 62 nt, synthetic construct
  source 1..62: mol_type = other RNA
cggctttcaagactaatagcttgctccttacgaggagacatctgcaccaccggcaagctttt

SEQ ID NO: 2775 - RNA, 55 nt, synthetic construct
  source 1..55: mol_type = other RNA
ggctttcaagactaatagattgctccttacgaggagacatctgcaccaccggcaa

SEQ ID NO: 2776 - RNA, 65 nt, synthetic construct
  source 1..65: mol_type = other RNA
ggctttcaagactaatagattgctccttacgaggagacatctgcaccaccggcaagcttttttgg

SEQ ID NO: 2777 - RNA, 56 nt, synthetic construct
  source 1..56: mol_type = other RNA
ggctttcaagactaatagattgctccttacgaggagacatctgcaccaccggcaag

SEQ ID NO: 2778 - RNA, 61 nt, synthetic construct
  source 1..61: mol_type = other RNA
ggctttcaagactaatagattgctccttacgaggagacatctgcaccaccggcaagctttt

SEQ ID NO: 2779 - RNA, 63 nt, synthetic construct
  source 1..63: mol_type = other RNA
ggctttcaagactaatagattgctccttacgaggagacatctgcaccaccggcaagctttttt

SEQ ID NO: 2780 - RNA, 57 nt, synthetic construct
  source 1..57: mol_type = other RNA
tttcaagactaatagattgctccttacgaggagacatctgcaccaccggcaagcttt

SEQ ID NO: 2781 - RNA, 55 nt, synthetic construct
  source 1..55: mol_type = other RNA
tttcaagacttagattgctccttacgaggagacatctgcaccaccggcaagcttt

SEQ ID NO: 2782 - RNA, 56 nt, synthetic construct
  source 1..56: mol_type = other RNA
ttcaagactaataggttgctccttacgaggagacatctgcaccaccggcaagcttt

SEQ ID NO: 2783 - RNA, 57 nt, synthetic construct
  source 1..57: mol_type = other RNA
ttcaagactaatagattgctccttacgaggagacatctgcaccaccggcaagctttt

SEQ ID NO: 2784 - RNA, 57 nt, synthetic construct
  source 1..57: mol_type = other RNA
tcaagactaatagattgctccttacgaggagacatctgcaccaccggcaagcttttt

SEQ ID NO: 2785 - RNA, 55 nt, synthetic construct
  source 1..55: mol_type = other RNA
tcaagactaatagattgctccttacgaggagacatctgcaccaccggcaagcttt

SEQ ID NO: 2786 - RNA, 57 nt, synthetic construct
  source 1..57: mol_type = other RNA
caagactaatagattgctccttacgaggagacatctgcaccaccggcaagctttttt

SEQ ID NO: 2787 - RNA, 55 nt, synthetic construct
  source 1..55: mol_type = other RNA
aagactaatagattgctccttacgaggagacatctgcaccaccggcaagcttttt

SEQ ID NO: 2788 - RNA, 52 nt, synthetic construct
  source 1..52: mol_type = other RNA
aagactaatagattgctccttacgaggagacatctgcaccaccggcaagctt

SEQ ID NO: 2789 - RNA, 53 nt, synthetic construct
  source 1..53: mol_type = other RNA
aagactaatagattgctccttacgaggagacatctgcaccaccggcaagcttt

SEQ ID NO: 2790 - RNA, 54 nt, synthetic construct
  source 1..54: mol_type = other RNA
aagactaatagattgctccttacgaggagacatctgcaccaccggcaagctttt

SEQ ID NO: 2791 - RNA, 53 nt, synthetic construct
  source 1..53: mol_type = other RNA
agactaatagattgctccttacgaggagacatctgcaccaccggcaagctttt

SEQ ID NO: 2792 - RNA, 49 nt, synthetic construct
  source 1..49: mol_type = other RNA
agactaatagattgctccttacgaggagacatctgcaccaccggcaagc

SEQ ID NO: 2793 - RNA, 52 nt, synthetic construct
  source 1..52: mol_type = other RNA
agactaatagattgctccttacgaggagacatctgcaccaccggcaagcttt

SEQ ID NO: 2794 - RNA, 53 nt, synthetic construct
  source 1..53: mol_type = other RNA
ggactaatagattgctccttacgaggagacatctgcaccaccggcaagctttt

SEQ ID NO: 2795 - RNA, 53 nt, synthetic construct
  source 1..53: mol_type = other RNA
actaatagattgctccttacgaggagacatttgcaccaccggcaagctttttt

SEQ ID NO: 2796 - RNA, 50 nt, synthetic construct
  source 1..50: mol_type = other RNA
actaatagattgctccttacgaggagacatctgcaccaccggcaagcttt

SEQ ID NO: 2797 - RNA, 49 nt, synthetic construct
  source 1..49: mol_type = other RNA
aatagattgctccttacgaggagacatctgcaccaccggcaagcttttt

SEQ ID NO: 2798 - RNA, 46 nt, synthetic construct
  source 1..46: mol_type = other RNA
catagattgctccttacgaggagacatctgcaccaccggcaagctt

SEQ ID NO: 2799 - RNA, 45 nt, synthetic construct
  source 1..45: mol_type = other RNA
atagattgctccttacgaggagacatctgcaccaccggcaagctt

SEQ ID NO: 2800 - RNA, 46 nt, synthetic construct
  source 1..46: mol_type = other RNA
atagattgctccttacgaggagacatctgcaccaccggcaagcttt

SEQ ID NO: 2801 - RNA, 51 nt, synthetic construct
  source 1..51: mol_type = other RNA
atagattgctccttacgaggagacatctgcaccaccggcaagcttttttcc

SEQ ID NO: 2802 - RNA, 42 nt, synthetic construct
  source 1..42: mol_type = other RNA
atagattgctccttacgaggagacatccgcaccaccggtaag

SEQ ID NO: 2803 - RNA, 51 nt, synthetic construct
  source 1..51: mol_type = other RNA
atagattgctccttacgaggagacatctgcaccaccggcaagcttttagaa

SEQ ID NO: 2804 - RNA, 47 nt, synthetic construct
  source 1..47: mol_type = other RNA
atagattgctccttacgaggagacatctgcaccaccggcaagctttt

SEQ ID NO: 2805 - RNA, 42 nt, synthetic construct
  source 1..42: mol_type = other RNA
atagattgctccttacgaggagacatctgcaccaccggcaag

SEQ ID NO: 2806 - RNA, 44 nt, synthetic construct
  source 1..44: mol_type = other RNA
atagattgctccttacgaggagacatctgcaccaccggcaagct

SEQ ID NO: 2807 - RNA, 51 nt, synthetic construct
  source 1..51: mol_type = other RNA
atagattgctccttacgaggagacatctgcaccaccggcaagctttttttt

SEQ ID NO: 2808 - RNA, 50 nt, synthetic construct
  source 1..50: mol_type = other RNA
atagattgctccttacgaggagacatctgcaccaccggcaagcttttttt

SEQ ID NO: 2809 - RNA, 43 nt, synthetic construct
  source 1..43: mol_type = other RNA
atagattgctccttacgaggagacatctgcaccaccggcaagc

SEQ ID NO: 2810 - RNA, 49 nt, synthetic construct
  source 1..49: mol_type = other RNA
atagattgctccttacgaggagacatctgcaccaccggcaagctttttg

SEQ ID NO: 2811 - RNA, 41 nt, synthetic construct
  source 1..41: mol_type = other RNA
atagattgctccttacgaggagacatctgcaccaccggcaa

SEQ ID NO: 2812 - DNA, 33 bp, synthetic construct
  source 1..33: mol_type = other DNA
gtttatattaaatactcgtattgctgttcgatt

SEQ ID NO: 2813 - DNA, 33 bp, synthetic construct
  source 1..33: mol_type = other DNA
ggttgtattaaatgatggtattgctgttcgatt

SEQ ID NO: 2814 - DNA, 17 bp, synthetic construct
  source 1..17: mol_type = other DNA
tgtattgctgttcgatt

SEQ ID NO: 2815 - DNA, 14 bp, synthetic construct
  source 1..14: mol_type = other DNA
attgctgttcgatt

SEQ ID NO: 2816 - DNA, 13 bp, synthetic construct
  source 1..13: mol_type = other DNA
ttgctgttcgatt

SEQ ID NO: 2817 - DNA, 12 bp, synthetic construct
  source 1..12: mol_type = other DNA
tgctgttcgatt

SEQ ID NO: 2818 - DNA, 12 bp, synthetic construct
  source 1..12: mol_type = other DNA
tnctgttcgatt

SEQ ID NO: 2819 - DNA, 40 bp, synthetic construct
  source 1..40: mol_type = other DNA
tttatattaaatactcgtattgctgttcgattatgaccga

SEQ ID NO: 2820 - DNA, 40 bp, synthetic construct
  source 1..40: mol_type = other DNA
gttgtattaaatactcgtattgctgttcgattatgaccga

SEQ ID NO: 2821 - DNA, 40 bp, synthetic construct
  source 1..40: mol_type = other DNA
gttgtattaaatactcgtattgctgttagattatgaccga

SEQ ID NO: 2822 - DNA, 26 bp, synthetic construct
  source 1..26: mol_type = other DNA
gttgtattaaatactcgtattgctgn

SEQ ID NO: 2823 - DNA, 27 bp, synthetic construct
  source 1..27: mol_type = other DNA
gttgtattaaatactcgtattgctgta

SEQ ID NO: 2824 - DNA, 30 bp, synthetic construct
  source 1..30: mol_type = other DNA
gttgtattaaatactcgtattgcnnnnnnn

SEQ ID NO: 2825 - DNA, 26 bp, synthetic construct
  source 1..26: mol_type = other DNA
gttgtattaaatactcgtattgctgt

SEQ ID NO: 2826 - DNA, 21 bp, synthetic construct
  source 1..21: mol_type = other DNA
tgctgttcgattatgaccgaa

SEQ ID NO: 2827 - DNA, 26 bp, synthetic construct
  source 1..26: mol_type = other DNA
tgtattgctgttcgattatgaccgaa

SEQ ID NO: 2828 - DNA, 12 bp, synthetic construct
  source 1..12: mol_type = other DNA
cgtattgctgta

SEQ ID NO: 2829 - RNA, 72 nt, synthetic construct
  source 1..72: mol_type = other RNA
ctttatatatcttgtggaaaggacgaaacaccggctttcaagactaatgattgctcctacgaggagacgggt

SEQ ID NO: 2830 - RNA, 63 nt, synthetic construct
  source 1..63: mol_type = other RNA
ctttatatatcttgtggaaaggacgaaacaccggaatagattgctccttacgaggagacgggt

SEQ ID NO: 2831 - RNA, 67 nt, synthetic construct
  source 1..67: mol_type = other RNA
tatcttgtggaaaggacgaaacaccggctttcaagactaatagattgctccttacgaggaggagacg

SEQ ID NO: 2832 - RNA, 48 nt, synthetic construct
  source 1..48: mol_type = other RNA
tatcttgtggaaaggacgaaacaccggattgctccttacgaggagacg

SEQ ID NO: 2833 - RNA, 65 nt, synthetic construct
  source 1..65: mol_type = other RNA
atatcttgtggaaaggacgaaacaccggctttcaagactaatagattgctccttacgaggagacg

SEQ ID NO: 2834 - RNA, 47 nt, synthetic construct
  source 1..47: mol_type = other RNA
atatcttgtggaaaggacgaacgccggttgctccttacgaggagacg

SEQ ID NO: 2835 - protein, 8 aa, synthetic construct
  VARIANT 1: note = X can be P or R
  VARIANT 8: note = X can be K or R
  VARIANT 2..3: note = X can be any amino acid
XXXKRDEX

SEQ ID NO: 2836 - protein, 8 aa, synthetic construct
  VARIANT 1: note = X can be R or P
  VARIANT 6: note = X can be K or R
  VARIANT 2..3: note = X can be any amino acid
XXXKRXDE

SEQ ID NO: 2837 - protein, 19 aa, synthetic construct
  VARIANT 3..14: note = X can be any amino acid
  REGION 13..14: note = Any one or all of amino acids 13-14 can either be present or absent
KRXXXXXXXXXXXXKKRKR

SEQ ID NO: 2838 - protein, 19 aa, synthetic construct
  VARIANT 19: note = X can be K or R
  REGION 13..14: note = Any one or all of amino acids 13-14 can either be present or absent
  VARIANT 3..14: note = X can be any amino acid
  VARIANT 18: note = X can be any amino acid
KRXXXXXXXXXXXXKKRXX

1-276. (canceled)

277. A system comprising components, wherein the components comprise:
a) a polypeptide, or a nucleic acid encoding the polypeptide, wherein the polypeptide comprises an amino acid sequence that is at least 95% identical to SEQ ID NO: 32; and
b) an engineered guide nucleic acid, or a nucleic acid encoding the engineered guide nucleic acid, wherein the engineered guide nucleic acid comprises a spacer sequence comprising a nucleotide sequence that is complementary to a target sequence comprised in a target nucleic acid and a repeat sequence that binds to the polypeptide, wherein the spacer sequence and the repeat sequence are heterologous to each other, and wherein the spacer sequence is located 3′ of the repeat sequence,
wherein the polypeptide (i) binds to the engineered guide nucleic acid and (ii) comprises nuclease activity.

278. The system of claim 277, wherein the repeat sequence of the engineered guide nucleic acid comprises an RNA sequence that is at least 90% identical to an RNA equivalent of SEQ ID NO: 71.

279. The system of claim 277, wherein the polypeptide comprises trans cleavage activity and is capable of cleaving ssDNA.

280. The system of claim 277, wherein the components further comprise at least one of:
a) a detection reagent; or
b) an amplification reagent.

281. The system of claim 280, wherein:
a) the detection reagent is selected from: a reporter nucleic acid, a detection moiety, and an additional polypeptide, or is a combination thereof; and
b) the amplification reagent is selected from: a primer, a polymerase, a dNTP, and an rNTP, or is a combination thereof.

282. The system of claim 277, wherein the target sequence is adjacent to a protospacer adjacent motif (PAM) comprising a sequence of 5′-GTTN-3′.

283. The system of claim 277, wherein:
(i) the system comprises a reaction mixture comprising the polypeptide, the engineered guide nucleic acid, and a reporter;
(ii) the polypeptide is effective to cleave the reporter in response to formation of a complex comprising the polypeptide, the engineered guide nucleic acid, and the target nucleic acid; or
(iii) cleavage of the reporter is effective to produce a detectable product.

284. The system of claim 283, wherein the reaction mixture further comprises reagents for amplifying the target nucleic acid.

285. The system of claim 283, wherein the reaction mixture further comprises reagents for reverse transcription.

286. The system of claim 283, wherein the reporter comprises a fluorescent label and a quencher.

287. A method of detecting a target nucleic acid in a sample using the system of claim 283, the method comprising:
(i) contacting the sample with the polypeptide, the engineered guide nucleic acid, and the reporter in the reaction mixture; and
(ii) detecting a detectable signal when the target nucleic acid is present in the sample.
